United States Patent Application Publication US 2008/0274467 A1 - sequence listing, part 14

SEQ ID NO: 1692 - DNA, 1496590 bp, Mus musculus
  misc_feature (1)...(1496590): n = A,T,C or G
tggagtcctctcttctgacatctgactgaggagctgggggcctcctcacctccctgcctggatgaattctttgatttggactggacagcttcaaacagcatgggatctactttctccataaggtatggggcaaaattctgttgataggagcagggtggtaatggtagcagtgagtggaacactagcagcaaaaataaaaacgatgctttctgatgatactagtagctagcatttgtttaagtttcttcttcttcttattattttttaaaggatttaatttcattatatctttgtgactcttggtagcaacccttgggaatgggtgttagaattcgtcatgcaggtttccagaaagggaaactgaggcttggagagggtcctaaaacttgttcaaaatggtagtttacaagagccaggatttaaatctagactgttggtcttccataagccacatgtctacccactggtggtgaaaagtgtacctgtgtgcattgcagtgttgctgctatctgtatctgaccctccttcctcatgaaaaaagcaggctgtgttttcatctgtcctcttatagcacgtgtgaactataaggcaggctgaataaaggtagcaatgtgcaaaccccaaggaagaacaaatccttccaaataactgctaaccaggatgatagtataatttgtaactgatatggttatcttaattagaatgcagtctggttcttcacagcccagtcagagagttcatttgacaggcgagtgcagcgatagctaaggtctttcgttattattattgttgttgttgctatttatacagcacgtgtgcacacacatacacttgtgccagagactgccagtgcacatatacctcagcatgagtgtgaaagtcggggacaaccttaggtgttggtccttccccttgttggagacaggggacaggtgtcttggttgtttatctacaacatgagtttccaggaattttcagagagagagtgacggtctctagctgtcacttcctcagaggagcactaagaagatcacagacccttgcactgctttttcgtgagtttggggaatccaaactcaggtctttgaagatcatgtggcaaaacttttacccactaagccatctccccagttccaggtataaagtttaaaggttttgcttaagttttcctctttgtcacgtcctgttacatttctaagtacttcagttgacaagtagaaattctaaatgagacagatctagatcacccttttagatgttatataaggaggtgataaagaccttggagtgattctcagaaaagtagccaacctcccagagttgccatattttgatatatgaattggttttcatttgtctagtgccgaagaaggaagtggttaattttattttccataatgggtggtttatgtcttactgcttaattctgggttttatgatagacgatggttatcaagtaaacctattgtcaggcatgcattcaagctctggggtcagtgtcttatgctactatcaccaacacttgatttttagttgtttactgtttctaaaaaggtttattttattttactttattttattttatgtttatgcatatatccttgagttaggcatgcctatcagtgcatgcaagggccaggagaggtctcctgcaactagaggctcagacagttgtgagctgctatgtgggtgctcagaaccaagtcccagttctctgcaagagcagccagtgctcttcaccactgatccatccctccatccctcagtaacacttttaattcggtcacgtgatcaataagtatgtcatggtcaaggcactgttgtgcatgtatttggtttcttctcttttccccggtccaggaggaagcatggtggaagtgttccatctcttccctgtccctcttctctcattgagatcacatggacaatttcttcttctagttctacttggtgcctgcgtggtgttgggacgacgacattctctgcctcttacagtgaatgtgtcaagggggtaggggatggagaactcagggtgcatgtgcaaagttacaggtgaaattttcctgtctcttgctacagacacctgctcaccactcattccctgcctgcgccccaacttaggtaatgctaagaaagcttatcctggattctcaggaacctgatacagctgtctcctgagaggctctgccagtgcctgatgaatacaaaagtggatgttcacagccatccattggactgagcacagggttcccaatgaaggagctagagaaaggacccaaggacctgaaggggtttgcaaacccctaggaggaacaacaatatgaactaaccagtaacccccccccccccccgagctccttgggactaaaaccaccaaccaaagaaaacacaaggtgggactcatggctctagctgcatatgtagcagaggatggcctagttggtcatcgatgggaggagaggctcttggtcctgggaaggttctatgccccagtataggggaatgccaggacagggaagcaggagtaggtgggttagtgagcaggggagggcaggtggggatagggggtttttggatgggaaactaggaaaggggataacatttgaaatgtaaataaagaaaatatctaattaagaaaatctaacaaaaatcctacttacagggagaggacacatactaaactacttatcaaagctcttatattagtttatcagattttatgtccagccaaggcatctctggagtcatactataatcccagttttcaaaaaagagagaacagggggatagtgggaattatcatgaacattttcagaaataacttgagttatttagtattaaaatatatgtctaggggctagagaaatggcccagtggttaagagcactggctgctcttcccgaggtcctgagttcaattcccagcagccacatgatggctcacaaccatctgtaatggaacctgatgctctcctttggtatatctgaagatagcaccagtgtactcatgtacataaaataaagaaatctgaaaagcgttatgttccaaatatgtctaatgttaatacaattgcaactctcttgccctcaattgtgctttcagtttcttgagtatcttttcattttaaatacgttttcaacaacaacaacaacaacaacaacaacaacaacaacaacaacaacaacaacaacgaagcttatcctgaaagtatggacagcagtccctggaaaaaattaccctcaacagaatctagctccacgtgagtgctccttgtatgaggtctgaccagttccctttttgagctcaaggtctctgagtttctagtttctacctctttaaacacagggtgcacaaaatggctagacatctcttcagaccttgtgtggtttttgatgtgttaacatatctggcagagagaaaaggaaacctccaatagcttctgaagactgaaattaaaatttcacaggctgggtttcaaggtcttctataatctcacctcagcctgtggcttggatacatgcctctttcttctaatgttaatcacacattggattgcagccattaggccaacaagcagtctcgtggttttgataaaggtatccagaggacgtttggggaacactgctttagtgttatctagcatgctgcacttattgcaggccaggcaaagcatgctttagtatagctatttttctaaatcagaattgccctgagataaaaattgagcctttgtgtatgaatgcataaaagagcacacaggccagaggactttgccctttgaaacacttgcttgcaagactgggccagggctagtaactgggggcttggtccctggagttattttagtcaatagttagctaccctgtggttcactgtacctcaactcctcctcctcctcctcctcctcctcctcctccttctcctcttcttcttcttcttcttcttcttcttcttcttcttcttcttcttcttcttcttcttcttcttcttnnnnnnnnnnnnnnnnnnnnnnnnnnnnnnnnnnnnnnnnnnnnnnnnnnnnnnnnnnnnnnnnnnnnnnnnnnnnnnnnnnnnnnnnnnnnnnnnnnnnnnnnnnnnnnnnnnnnnnnnnnnnnnnnnnnnnnnnnnnnnnnnnnnnnnnnnnnnnnnnnnnnnnnnnnnnnnnnnnnnnnnnnnnnnnnnnnnnnnnnnnnnnnnnnnnnnnnnnnnnnnnnnnnnnnnnnnnnnnnnnnnnnnnnnnnnnnnnnnnnnnnnnnnnnnnnnnnnnnnnnnnnnnnnnnnnnnnnnnnnnnnnnnnnnnnnnnnnnnnnnnnnnnnnnnnnnnnnnnnnnnnnnnnnnnnnnnnnnnnnnntactctttctttaagaaaaactattctttctttcttttttgagtatgcacacatgattgttgcagaaaataatttaaaaaaaattaaccgtcacatccccgcacttgtgccagctactctgtctcagcgggctggccagccatgcactggtgggcaatggccaacctgtttttatcttgtggagactcctggcccagagcttctgaagcgtctccacccagctcactaagttcccactggtgggtcactaccaagccagccccgccagccctgtgcttcaaatcctccaccgcctttgtgatgcacatcagaccaactcacactttgccatcataccttgaacccagatcaataccagaactctctcgaacccagtgaaggttgtgcctcaactcttatacaaaccacagttgcccttaaatagccgatttccttctgggagtcttgaattgctttagaatgctaggcagaaagtgcttatgtgattaaccccattaaaaccttatggtgcagattcccaaagatctgggctgaaacatcatataccagtcactgcattttagtgtctgggatctgtgtgatcctttataggggggagaacatcaaaagtctcacatgggaccctttgtagtatgcctgtgttctgtcccatcaggatgtacttagatcattgtagtaaatctcagctaagtccaactctgagtgagtccttctggtgaatatccaaattgaggagggaggatgaaaaacacaatatcccaaacaatgttcttttactttcttagttctgtttttgctctgtgtgtgtgtgtgtggtgtgtgtgtgtgtgtgtgtgtgtgtgtgtgtgtgtgtgtattcacatgtgctggaccttgtcaattttggggacttttgtgcagcatcaaggggaaggatgcaggcacatgaagactgaagtttgatggtcagggctgggaaagaatgttttggtgaagggtgtggaagggagaagaacatcaaaaagcttctgtgagggacacagccacacagaagcaaggaggctttctggatggctaccacggacaaaggtgcctttcagtgtctcaggaccacagcagaggatttgttgctttaaaatttcttcttggtagctgaactggtttcctttaataaaagtctctaagaacaaattgtggctcatggtttaggtttaaggttttttgttgttgattttgtctgatgatatagttctagatgtagtgtgcatagatctttagcaaagtttacgataaaggctaggaggtgtattccagttgtaaagaacatgttcagtaatgtgctaatctgtgggcactcctcccccatacacacactaaagttttaagaaacaaaacctggagaaagagagagagagagagagagagagagagcgacagagagacagagatacagagagagacagagacagagaaagacagaaagaggcaaagaggcagaagagagaaagagacagggacagagacagaaaaagacagagactgagacagagagaatacatagacttagcaccagacatctttatccattgagtccttttgccagccctacataatacttcctttcccttcagtcctcctccttctctctctctctctctctctctctctctctctcttcttcctnnnnnnnnnnnnnnnnnnnnnnnnnnnnnnnnnnnnnnnnnnnnnnnnnnnnnnnnnnnnnnnnnnnnnnnnnnnnnnnnnnnnnnnnnnnnnnnnnnnnnnnnnnnnnnnnnnnnnnnnnnnnnnnnnnnnnnnnnnnnnnnnnnnnnnnnnnnnnnnnnnnnnnnnnnnnnnnnnnnnnnnnnnnnnnnnnnnnnnnnnnnnnnnnnnnnnnnnnnnnnnnnnnnnnnnnnnnnnnnnnnnnnnnnnnnnnnnnnnnnnnnnnnnnnnnnnnnnnnnnnnnnnnnnnnnnnnnnnnnnnnnnnnnnnnnnnnnnnnnnnnnnnnnnnnnnnnnnnnnnnnnnnnnnnnnnnnnnnnnnnnnnnnnnnnnnnnnnnnnnnnnnnnnnnnnnnnnnnnnnnnnnnnnnnnnnnnnnnnnnnnnnnnnnnnnnnnnnnnnnnnnnnnnnnnnnnnnnnnnnnnnnnnnnnnnnnnnnnnnnnnnnnnnnnnnnnnnnnnnnnnnnnnnnnnnnnnnnnnnnnnnnnnnnnnnnnnnnnnnnnnnnnnnnnnnnnnnnnnnnnnnnnnnnnnnnnnnnnnnnnnnnnnnnnnnnnnnnnnnnnnnnnnnnnnnnnnnnnnnnnnnnnnnnnnnnnnnnnnnnnnnnnnnnnnnnnnnnnnnnnnnnnnnnnnnnnnnnnnnnnnnnnnnnnnnnnnnnnnnnnnnnnnnnnnnnnnnnnnnnnnnnnnnnnnnnnnnnnnnnnnnnnnnnnnnnnnnnnnnnnnnnnnnnnnnnnnnnnnnnnnnnnnnnnnnnnnnnnnnnnnnnnnnnnnnnnnnnnnnnnnnnnnnnnnnnnnnnnnnnnnnnnnnnnnnnnnnnnnnnnnnnnnnnnnnnnnnnnnnnnnnnnnnnnnnnnnnnnnnnnnnnnnnnnnnnnnnnnnnnnnnnnnnnnnnnnnnnnnnnnnnnnnnnnnnnnnnnnnnnnnnnnnnnnnnnnnnnnnnnnnnnnnnnnnnnnnnnnnnnnnnnnnnnnnnnnnnnnnnnnnnnnnnnnnnnnnnnnnnnnnnnnnnnnnnnnnnnnnnnnnnnnnnnnnnnnnnnnnnnnnnnnnnnnnnnnnnnnnnnnnnnnnnnnnnnnnnnnnnnnnnnnnnnnnnnnnnnnnnnnnnnnnnnnnnnnnnnnnnnnnnnnnnnnnnnnnnnnnnnnnnnnnnnnnnnnnnnnnnnnnnnnnnnnnnnnnnnnnnnnnnnnnnnnnnnnnnnnnnnnnnnnnnnnnnnnnnnnnnnnnnnnnnnnnnnnnnnnnnnnnnnnnnnnnnnnnnnnnnnnnnnnnnnnnnnnnnnnnnnnnnnnnnnnnnnnnnnnnnnnnnnnnnnnnnnnnnnnnnnnnnnnnnnnnnnnnnnnnnnnnnnnnnnnnnnnnnnnnnnnnnnnnnnnnnnnnnnnnnnnnnnnnnnnnnnnnnnnnnnnnnnnnnnnnnnnnnnnnnnnnnnnnnnnnnnnnnnnnnnnnnnnnnnnnnnnnnnnnnnnnnnnnnnnnnnnnnnnnnnnnnnnnnnnnnnnnnnnnnnnnnnnnnnnnnnnnnnnnnnnnnnnnnnnnnnnnnnnnnnnnnnnnnnnnnnnnnnnnnnnnnnnnnnnnnnnnnnnnnnnnnnnnnnnnnnnnnnnnnnnnnnnnnnnnnnnnnnnnnnnnnnnnnnnnnnnnnnnnnnnnnnnnnnnnnnnnnnnnnnnnnnnnnnnnnnnnnnnnnnnnnnnnnnnnnnnnnnnnnnnnnnnnnnnnnnnnnnnnnnnnnnnnnnnnnnnnnnnnnnnnnnnnnnnnnnnnnnnnnnnnnnnnnnnnnnnnnnnnnnnnnnnnnnnnnnnnnnnnnnnnnnnnnnnnnnnnnnnnnnnnnnnnnnnnnnnnnnnnnnnnnnnnnnnnnnnnnnnnnnnnnnnnnnnnnnnnnnnnnnnnnnnnnnnnnnnnnnnnnnnnnnnnnnnnnnnnnnnnnnnnnnnnnnnnnnnnnnnnnnnnnnnnnnnnnnnnnnnnnnnnnnnnnnnnnnnnnnnnnnnnnnnnnnnnnnnnnnnnnnnnnnnnnnnnnnnnnnnnnnnnnnnnnnnnnnnnnnnnntaaacttttcctcgggttcaagatccgtggaaaggcctgtatacttattttgtgtaccatatttcctctttgctcctactctctctccccgctttacttctgatagattgccctgaatttcatccagaattttcagccctgccttaaccacttgatagcatgtgaaaaggaacaaaaaggctcctaacactagaaaaagttcaaggccaaacataccttgtaaagctatttcccactttacttctgatagactgtcttgaatttcgttagaaagttcaagaccagacttaccttgtaaagctatacttacaggtaccctgttccccagctgaagagttctgaattcacgcagttgaatccttctcaacagtctgttttacgggaacacttcattaccaccgttccccagctgaagagttctgaatccaggctggatccttctcaacagtctgttttacgggaacacttcattactatgacccgcagttctggttccggaatgagggatcttccttgcgccagtgatggtaaccgtccagggttttctcatcccaggatttctcgtcccgggttttcttgtcccaggtcttctagtcccgggttttctcgtctcgggtttcggcaccaactcttacacgcattcgcgaccggccaggaaagatgcaacaaaccagaatcttctgcggcaaaagctttattgcttacatcttcaggagccagagagcaagagagcaagagccagagcaagagagagaaaaagaacaagaacaagaaagcaagagagagaaagcaagagagagaaaaagcaagaacaagagagagagagagagaatggcaaaaccccgtcccttttaaggagaattatcctccgcctaggacgtattactccctgattggctgcagcccatcggctcagttgtcatcacaagaaaggcagaacacatggcgggaaaactgcccctgcacgtgtgcagattatgtttaccacttagaacacagctgtcagcgccatcttataatggcaaatgtgagggcggctcccaacaccccttccttctcttttcccagttctctccccaaactccatctacttcacctccatttcccgtctgaaaagggccagcctagatggacatcagccagccatggcacatcaagttacagtaagactaggcacaccctctcctattaaggctagaaaaggcagcccagtagagggaaagggtcccaaagtcaggtaacagagtcagagacagctcctgctcccgctgttagaagatcaagctcccagaagacgataaagctgcacagctgtaacatgtgtgtggagagcctaggtcagtcccatgcaggctccctgcttggtagttcaatctctgtgagcccctatggtctcaggttggttgattctgtggattttcttgtggtatccttgaccccacaggctcctacaatccttcgtccccctcttcagcaggattaccaaagccctgcctaatgtttggctgtgggtctctgcttctgtttttaaacaaacagttaattgctgagtgaagcctctttgatgactactgggctagacaccaatccatgagtatagtaaaatatatttaggagtcatttcattgactttttttccccccatttatttccaaggaccagctttggtttggacaggggctctgagagaagggttttgaaagcagtgaaaccaaggacttgaaatcaaattgtggatccaagctcatggcctatgttctgcttgaggcagctttcagactgctctctgtatattctgctcgagacagttctccacgcagttctctcttgctattctaaaaagtctctggatagctcatttcttgcagatcaaaagaccagtttttaatttacatgtcacttcagtcactaccccaggttcacttttgattatccttatgaatcagcatcccttgacctggccccttgactcttgggtgacagcaagcacattaaaaaaaaaattgcaaaagaattcagagctcttaagcacagatggtaagctagctgggcaagacctcaccttgaaatcgccatttctaccattcctgggcctaaccttgctctgtcccaggctgacttagaactcaggaatctgccttcccttgtaagcataaacaaaaaaatttagatgggtagaagtttctgtgatcaccactccctaaatatctttatctccttccttagtatctttctgacaagttggctcatagcacaagctgtctgctcctttacatctgtgaagctctttatataattaatattgcatccttatattttacatagttgagaaaatatatatttttgaactcaaggttttagggcttttttccatagccttaagggctgtcttaaaggttccagcatttaccattttgctaaagacatagacatacccttaactcctggacttgtgctatttctaactatcatggagttattagcattaacagggaggacattcctcaaaggaggaacatgaaaatattatacaaacaagccttatagccacagtaaccatcaatactcatggaggtccatgccctgctggctctgtttcaggggcaggaaccatatcatgttgttccttacacatggccaagcaggacttggcaatttgtgtttggtgttctatgttgtgtttttgattcctgatattctgggcagtgtcaagggtgggctccctctcatggcatgggtcttaagctggactagtcattggttgtccactcccacaatttttgtgccacctcaatttctgaaccaacttttaccccagcacatcttgtaggcaggacaaatataggttgaaggttttgtggctgggtcagtgtcccaatccctcccctagaagtctctgtatacacaatgcttgatgataactgattgcttcactcacaagcatttattgaatgtgcgttatctctaaggcaccagatgcaagagtaagtgaaaagaaattcctgcccacatggggccgggggacttgcacatgccagtttcggatctcttggggatcctaaggaggtcctctctcatgccacctggggacggctttcctattcagcttaccttgcatctctcagccttgatttcactcatctatctagaggtgccggtgaagcacatgttgtgcattatctttctttttgcaattattaatttcagctgttgttttttaaacctgccctttgccactgttttcttgatttctctagaatgagttagcatcaataacggatgatttttttgccaatacattactacttagtaacaagagaaataccatctatcatccattaataaaggagatcatacactttcctagttagcatcggatttacagagtgccaggagttcacagtatatactttgtaacacctagttcatagtatgatttgtctgaggttacatacctagttgatggtataattgccatgattttgcaattcctactatcatatgtataattattttatttatatcctgtgccaatctttctgatacagaatgtaaatttactgagtatagatattggtctttatttttgattcctaatgaataacatatttcttagggatgaaaagatctgttggataaatgcttagatgaaatattagtcagggtttccagagaaacagaaccaatgggaaatacacagacatgcaagagaagatttattatgggaattcactcatgtgattatggaggttgagaagtctcacaatatgctgtctgcaagtagaagagccaggaaagctgctggtgaaattcagtccaagtctgaagacctatgaactagggaaagaacgttctaactcccaaactgatggcacaggttagaaaaaccagttgaactgctggaggaggtcctgatatgtgagtgcttaggaacaaagagcttcaaattcctaggagatggacatcttagcttcaggtcttctattctaaagttggacatctcggcttagggtcctctgctctgaagatggacagcctgaggtcctcctctctttactcggagcctccagtggatggatggatgctttctctacatctttacttgctgtatgatgtaaatgcttatcttttccagacacatagacacacctgagtctccctttgccccactgagctgacacatgaaactcatcattactattgacaaaggacaaaagctctagggtttccacgtgggtccacatgacatttcttttccatattagaacataaaatgtgaacaaaaagttttcattatttttgggacaaatattatgcttgaggcacttggctaggcactatattaaatataattaaccaggcagtagtggtgcaacctctaatcccaggtctcgggaggacagacaggactctacagagaaaccctgtttcaaacaaaacaagagccaaatatgtttactggttcaaatatgattaagacaaagtacttgtcctgaagatagagactataagctagatattgtagtgactgtagtataaggtaggacttaaatgctttcagggaaataacatgttgtttaaagaaaattagaaaatgtatgtatgtttcataggtgaggtgatttttgacttgaacattactgcaggatccaaattctagaggtatactgaggaggagtggggaataggaacatgagtcactttggagaacctataacatgtctctcttagctttggcatgtgaagtaaagtgtgggtaggctgaggggtgggacaaagtataactagaaagtcaggttgccaggcagctttgcctgctcaagttcagggcttgcaacttagttcatcaggtttgttagcatggactttagccatgacagtgttatcagtcagcagcagacaggctaaatctaaggcaaatcaaccagtgcttcacgcacagagattttaacatctcggcaacaggaaaggtggcaggtcagtcacaggatggcggtagacttgggaagatggcacggtgtgacagcattggtgaatgaaatggcacagaaagtgcaagactgagaagagccaatggcagtgcttccattaccacacatttatacttactacagcctattcggattttccatattcgtcttcatgtccttcatcagcgagcccctaggggacagggcatatcaccttcatctgcacaaaaggcttggcagctgcttggtgaatgtttccagagtgattgcaagttaggagaggcagctgggtaatggcccctgggtccctggaggacatgaatgcttctttttggacctgctggaatttgggaggggggtacatttcaaggaataacagaaagaactagagaatagttagggcttgatgtgtaaggggagggatgccaagggtagaagtgattaggttggatacagatagaatacacgcactatatccctgcattggattgaagagaaaaaagccttcctcacatctatctggcaagactgtgatatggagcaagcccccaaataacaggaaggactgaggtggccgtgtgtatggtgcttgctcacagaagccaaggagaaaccagacatgatgtcaaagaaccatacagttagcgtttgggaggctgagacatgaagattaggaggttcaaggtcagcctggggtttcatagtgtgacttctctcagacaaatacatgaacaacacacaaatgcctagaggaagagaaatagtacaagttggcagccatagagcaaagctggcttgccctctgactcagtctgtggattctgtcttgcctcagtttctccttgagtgaaataaggttaaaatagtcataataaatgatggtatacataatcatggtcacagctcttaaagtagagcttggttgtagtaataacgtcctaagcattaattcttggtcttattcaaatctacaagaactaactaccttacctatattataatagcccctttaacccttattaattgggtaggtagttgttatcttcatcccactagagaaaggtgaggcacagagagattttgtaacttatcagagtcccatagccactaagagataaagcttaactcaagatagagtcttaccccacccatctggcctcaggcttatacactaacacatcactcctaggaatacaggatgagaaccacttgctgagcaacctgttgatgatcagtaggtgtgaagaagcatggcaagagggcaacaatggagagacttacactgctagaaagtttcacctggcaaccttgggaaagagcagggatggagagcagggtagtggagaatccagctcagggaggctgggtttgcaaaccaggttagaagatgggctgaatgtgtggctgatgtaaaccaggtggaagtgatggtctatggaggtatgcaactggcagcacatactgggcagaacccagcgttcccacgggagtcaaaccaagcgctgtgcagaaacaacaggaggttggaaaggggccttgtctttactctgttcaagaaaagtatctttggtggcactaccactttccctagagaagagcatctgctcactagagtgggccatttcattaggtacagtggctgtctggttttgaggggacccacactgggcttggctttgctatctgtcagtcttatggcagaaggtaccctttcagtagttttcttttctgtgcacgatttaaggggaggtttacgtttctgccttactgtatttctcatccatgacacggcgtggtgataatttgcattttggaaggtagagaatcagttcagttgatttcctgctttctgttccggggctctgagttgtcacttcccattcaaatgggattcagcggaacacacaaagctgaaaattctagtggagttgatttgccatgggggggaaaaagcgagttcgtggtttagggggatctgctctagagagtttactcttcagtttgtttgtttgtttgtttaatactaggagtgaaatgaggggaactttcacttttatcctgtaagtcctattctatgagcctgattttcaaaatctactcctcaggttaagatattgatcagattttgagatctcaggaggtgcttgctcccttggacatggggtaatggggggcatcttctagtgtttattctctaacctattccttcttttcctcttttctatcatttacaatatctccaggttcttgatttcatttctttccctcattgaaaggtggatgttctaatttcccctgtatagcaagtgacactgatgctttagtgacgtttagtgacttagcctggctcactcaggtaattacatctgtgaggatgagactctaatgtgccatcttcagacatcttgtgctttcttcttttcatatgacacagattttctggtaagatgctgtcaggaagcaaggaaataggggttgggttgggaagtgtgggcagattcccctgctattgaattttgtacgcagatggataaatcaaattgtagaagcaccaccctacctctttttggtcatagacttgcatctgatgtgtcttgagggaaccattaattgcaattatggagacaaactaaaatgttatgtgtgggctcagccatgtttcatgctgtttttggatggcacacatgttttgctgggacaagatgcattttatgttaccctagtcttggtaaagcaaatgaaggtggggagccagttatgagttggtgtcaatacaagtctttagtcaggaaaaggggatcagatttagtggctacatagaagaagtcagtggtggaactctgattattagaaatccaaggagggagtatctagaaatctcggctgctgccgtgtctgacaagtttatgaagtgatctgatctgactggactctgaagagaactctctgattctagagcagacctcaggaccagacctacaaccaagttccttctgtgtctggactggaggatagcatgtgctttcctaccatctgtgagcagtccccaacctagcagtagatcttcttcctgaatcaagccactccctccacagccccaaagcagaagcagtgggtgggtggtgagctggtggttggcttgaggtcacatcccacaggctgctagtcagttgcattgctgttagatcctgacctttctctttcaggacttacaaaagaagagtagatgaatagggaattaaatattaggaaaaggagggtttggcaaacacaggcacacacacctggcagaagcctcttcctctagagtgtgcatcataaagaggattttgagagttggcatttccaaaggctgtagctctaaagaagaggattcaacaaaggaacttagattcggactagactgtggtctagatgtggaggttaggattccgtgtaactggctaacgtaggagcaagcactgatggaaatagagtgcttgaggcaccaatgaggactcggaggttgaggattaaaaactgaagaggaaagaaaggacatgtatttgcggtcatcagaggcaaaaagacatcatggtccagcatccatttagggtatgcatctctgcacccagaccaaatagctatgcaatgtttatcatatcttactatttatttgtttaaggaaggtggtggaatatttgtaagctgaatattattttaaaaaacacgagggagttttaccccttagaagacttattttagggagtagatgctctctttcagtgattggctttgaatctctggattgtaaagaatttcctctctgtaggggccaacattctacccttttacagattctggaatgttttctgtttttgagacaaggtcctaccctatatgccagggtgatcttgaattgaccaatcctcccgcctctgcccgtagattactgagaccacaggatgcactacaacacttaactttgactttttatttcctgctgagtgtttggttgcaaaattcataactcaagttagtaattatttcccagttatttttttttatttcaaatagactgaaatgtaaatataatactgaaatgtaaatatcttggggatactattttatatgtagaatttaaagaaaagcagaacgctaacctgcctcaagggttcatgctttttcagggcaagtcctgtgcaacagcacttttggaggtggctagcaaaggaaaatctttccaacagtggtgctcagccactaagtttgacttttggaaaatgaacattattctttttctaaatgggacactgtgagctcagtcatgtacaccatgaaaataattggtgtgttttagtttgccttgtgccagatatcatgctcgttgaaagatgattggcctcaaatcagcacatttaaaggtcaactggttgttcttaaactgcaaaacttttaactctttcattctcaagagctttttacccaaatggccatgtcaggagagacagtgtacactgtatgttaacttttggaacattttgttcttgaaatgtttctttttatgaagttctctgggctccctgtagctacaaaggatctgagaaatgagttttctgtcagcttttagacatgactcagagcagaagggaccaggttcttccatagttaatacatttggatgggagctctaatatggttgtggccagcacatgggtatcatcatgggctggaagtcctatccttttatttaaaatgcttcaaattgtttaggaaacaaagcaaaacaacaacaacaaaaaagccccttctctttttttctttgtttttccacctttgagcaactttttcagtttcttaaataccccagaggagaaactctcattaaatgttcaatgtcaaacccagctgtttgtcattagctctggggttgctggatcactgaaggtgggttttgatgagttttcttaaccagactgacaggatacctgaggtcagcagctcatgttgttggtatccagaatatctctcagctatttgtgctaggtttcccaacataagattgaggactggcccatctcaaataggttgagtgggttttagtcacccaatgaaacagttccctgtgctttgggttagtgtcttggtgagcccctagatgttcattggccagcactctgctatgaagactggtttaggagcttcaaagctttaccatttcttgaggataaagctacctgctgatacagacctagaactcagtcccttctccagcaccatgtctgcctgtgtgccgccatgcttcttgccatgatgataatggactaaacctttgaaactgtaagccatccccaattaaatgtttttcttattgtgagttgccatggtcatggtatcccttcacagaaatagaaacgcctaactaagacaattggcctgcaagattttttctgaaggagttgcacaaatctatgagtttggcttaaatttgtttcctttctcatgccttaaaactcaagttttgattttgtttttgttttttgtttccccatggaaaactagctgagactggttggaagacatttggaatatagaatgctctgctccagacagtagagagtgcattggtcaagtggtacctgagggtagaaatggaagggtgggatacagtcatgtcaggtgactgtcagcctgccaaaaggaggatctggaagaatagagaggacacataaaggaacacaattcagcacggtctataagaagtaacccatccatgaaagacaagagatcttgataatggacaactgcccttcgtctttgctcagggcttctgtgtctcaatgagtgttgtatccagtacagtaatgactgctcctaaatactctctgtcaaacgttctaacctatgtttacctctattacatggtttttctcatatttttctctagttaaatcactcacgatcaatatgtctttcttaagttgatgctttaattatgagtctttcatcattcaaactctattttatcattaatggacacccacagaggagtctttacatctgaactaaatgaaaatgctgttgctacagcatacttacaaccaggtgtgagtcaatttattttgtcattgttgcaaaatatcagcaaaatctaggaagtaaagatttcttttgattcctagttccataatcttcagtacatgtttgtttgtttgtttggttggtttttttggctctgttgttttgggtgtaagttgaagtagaatgtcataaagagagggtaatagaaaggatttctcatcctggtagacatgagggatgaagggaaaaagagaggagacagagcaagatagattcttcaatgactttccccagtggacgctatcttccaatgtgaatgcatccctagtagccaccactttcccataacaccatcaacttgtgaatctgtcagcagattaatactgatgttgtttgaattaccatgattcatcattcccctataggcccatcatctgacaaccaagcatataacacatgagcctttagggggagaagacttcatatacaaactacaataaacagtaagtaccctgtgtaatttataagaggctataatacttaaaattatgttggtcattttcagcatggttcaacaactgttttttactttattcaatgataataaatgcattctatattatatatgcatatatatatattacacacatatgtggatagtatacacaaactcttgggaaacaatgctttattgtacaagatgcattttatcaaattcttattttgttttattaaaaatatgttgataactcaccaacacaatcttcattttgaaaaactatctttagaacagtttatgtcccttgaaccctagtttactgtccacaatgaagacacatcacacaagctaatgtgtggccattctgatcatattttgagggattattttctcacttgtttatttagaaataaaagaaataacaaaaggaaaggttgggctagagccatcacataacctgcagagcacaatctcttctttcctttatgttctcccctagtaaagattgactttcaacattaaaaaaaaaccccacaaaacccagcttaatggtttctaacataaattagaagggtcacacagatcaaaatgagacatctatcttctcccctgctcccaaggctgaggttcattgcagatgagaggatggaatggttttaagagctggaggtagtggttatttgcatccaaacagtatattcaggatatggcagactgatgtacacaaaaacttatggtggatgagactgcatggataagatttgtccaggactgaggctataagagagaatgggggtgggagcatgagcaggcagccagtaaaagggagattacatgaaaaggccaggaaggttggagatgttacaaaggcacaggcaaaaccaggcaagaagagtagccaagaaacaaaactaaagtgggaaaagaactcaatgaagtgaagaggctagttcataattatgctttttcataaaagagaaagggcaacaataagaatgggaatttctaagagttttagcatttcaagatggactcagaggctaaaagtaatgcaataataggtaaactggaaggaacaaaatcagtatatttttatttgtgtatattatatatcatgacatttcatatgttcatgtgataaacttttcatgacattttgatgttcatataatatttgtagctggtagttttatgctctacctccctttagctcctggaggtaacccctacctcctgactttccttgaatcctcagacaaaagactcacacagtctgtttcttttcaactggccttagaacacaatttctgggtgatgctatctcccgcctggaaaagcatgcccatatcagtttcttatctcattctctcccacctgccctaaacttcagttgctaaattcctctatcccttgacaaacatccctgaccacctacctgaagtagtagctacaggccccagctcctcctgagacctcacatggctgctgcattccctctctctttccttgcatctggtttttcctcctgggactttgaagtcctgcctataccttctgctcagcaattggcccatgactttctttactgacagatcaagaaccaattggggaataggaccttaacattagaactgcccccttgcaaatatcttttgattatattcattctcaccacctcctcctcctcctcctcctcctcctcctcctccctccctccctccctccccctcttccctaatactctcctactttcaggtctccttttttattcccccaacactgcatttgaggaaaaccatgccattcctggcttttctaattctggcttatttcactcagcatgatgatctctggctctctatttgcctggtagctgcagcttttggtccttgaagatccaggattccagtggcacactatatattgcctttctctgcatcactgtttcgttgtccttgttagcttccctgtgactggtttcttcagtcttggtgttcattctttctgggtttatagtgaagttgtttcttgtccccacagcttgtctgactggcagagattcgtagaagcttctaatctgtcacctaacctaggagccccagtcattccttattcacagatttcatattttcaaatgtatctatttgcaaaagtttgtttataatgccagaaggtagcagtgccaggattttgcagtcattcatgaaaattttgagttgtaaaacatatccccagccatggttgaatgacagcatgtgcagatcctgcattctcttctactattgatgagtaagtatcattttcatggtatgtttggtgctgtgttattgaattttttgtttttttaggttttttttgctggtgattagttctttctgatggctttcatgcattttgctgaagcacccctaagcaaaagaacactaatgtgtccctttaggcgaatgtgtgttctggacaagtttctttcagctgtgagttaaagagctgtctctagagttttggcattaacaaaattatcaaggtatgttaaataaagtatctttaaacagaaagccacaggaattaggcctgatttgcggaattattgtttaaagtgttgagatcagaggctcataggaacctaattttatgtttctactgggaacaatgatccagtgtttgctaatttagaattcttagcaacttttataatatataaacaactgtgaatatgagtcagctctgtaaatgttttatttacgctgaaatgatggccaaagcataatgtgtgtgtagataattattggggttatagtcaactcaagcaatgctgttttttatttaattaagaacacactgttctctcctgttgagaacaaaattctgaacaaatttctttttgtttagaattcttctagtgcaccttagcagaaattttctgataattatgttgaataaattggccaaatttgagttacaaagtttatgctcttaaagcactcctagtctctgatgtaagatgggaggtgtgttcaggaaagtatattgaaagtcaagtggatgctcacagccatccattggacggagcacagggtccccaatgaagaaactagagaaaatacccaaggagctgaaggggtttggagccccataggatgaacaatatgaactaaccagtacccccagagctccgtgagactaaaccaccaacggaagaaaacacatggtgggactcatggctctagctgcatatgtagcagaggatggcctagttggtcatcaatgggaggagaggtccttggccttgtgaaggttctatgccccagtgtgggggaatgccagggccaggaagagggagtgggtgggttgttgagcagggggagaggggaagggataggggtttttcagaggggaaaccaggaaaggggataacatttgaaatgtaaataaagaaaaatctaataaaacagattaaaaaaaagaaagtcatttgtattctggagcagatattaaacaaagatagttggtgaagtttctaatcattcttggacatttaagaatccagtgtgaataaaggcaataagcatactcttttcatagaagggtgttttacccaggtctgatgtggaaaagtcagtgcgattcattccatgataggctccaacagtctgtttttccatttatggctattttaccaggaagacattcatatattttatgtgattcacaaggaacccataactccaaagagtcaaaaaaaaaatctgtgcatgttcagaaggtgaatttttgttacatatagaagagtggattcccactaaaatcagggactagacaaggctgcccactttctccctacctatttaacattgtacttgaagtcctagccagagcaattagacaacaaaaggagatcaaggggatacaaattggaaaggaagaagtcaaaatatcactatttacagatgatatgatagtatatataagtgaacccaaaaattccaccagagaactcctaaacctgataaacagcttcagtgcagtagctggatataaaattaacccaaataaatcaatggcctttttctacacaaaggataaatggactgagaaagaaattagggaaacaacacccttcacaatagtcacaaataatataaaataccttggcgtgactctaactaaggaagtgaaagatctgtatgataagaacatcaagtttctgaagaaagaaatggaagacgatctcagaagataggaagatctcccatgctcatggattggcaggattgatatagtaaaaaaggctatcttgctgaaaacaatctacagattcaatgcaatccccatcaaaatgccaactcaattcttcacggagatagaaagggtaatttgcaaattcatctggaataataaacctaggatagcaaaaactattctcaacaataaaagaacctctggtggaatcaccatgcctgacattaagctgttctacaaagcaattgtgataaaaacttcatggtactggtacagtgacagacaggtagatcaatggaatagagttgaagacccacaaatgaatccatacacctatggttacttgatctttgacaagggagctaaaaccatccagtggaaaaaagacagcatttttttcaacaaatggtgctggcacaactggtggttatcatgtagaagaatgcgaattgatccattcttatctccttgtacaaagctcaagtttaagtggatcaaagacctccacataaaaccaaagacactaaaattaattgaggagaaagtggggaaaagtctcaaagatatgggcacaggggaaaaattcctaaacagaacagcaatggcttgtgctgtaagatcaagaattgacaaacgggacctcataaaattgcaaagcttctgtaaggcaaaagacactgtcaataagacaaaaaggccaacaacagattgggaaaggatttttaccaatcctaaatctgataggggactaatatctaatatatacaaagagctcaagaagctggcctgaagaaattcaaataacccaattaaaaatggggtacagagctaaacaaagaattctcaactgaggaatattgaagggctgagaagcacctaaaaaatgttcaacatccttaatcatcagggaaatgcaaatcaaaacatccttgagatttcacctcacaccagtcagaatggctaaggtaaaaaattcaggtgacagcagatgctggcaaggatgtggagaaagaggaacactccttcattgctggtgggattgcaagcttgtacaaccactctggaagtcagtctggaggttcttcagaaaatcagacataatactaccggaagatccagcaatacctctcctgggcatatacccagaagaagttccaactggtaataagaacacatgctccactatgttcatagcagccttatttataatagccagaagctggaaagaacccagatgttcctcaacagaagaatggatacagaaaatgtggtacatttacacaatggagaactactcagctattaaaaacaatgaatttatgaaattcttggacaaatggatgtatctggaggatatcatccttagtgaggtaacccaatcacaaaagaagtcattagatatgcactcactgatattagcccagaaacatagaacacccaagatacaatttgcaaaacacaagaaaatcaagaagaggaaagaccaatgggtggatacttcgttcctccttaaaatagggaacaaaatacccatggaaggagttacagagacaaagtttggagctaagatgaaaggatggtctatccagagactattccacccagggatccatcccataatcagccaccaaacccagacactattgcatatgccagaaagattttgctgaagggaccctggtatagctgtcttgtatgaggctatgccagtgcctggcaaatacagaagtggatgctcacagtcatcataagatggaacacagggcccccaatggaaaagctagagaaagcacccaaggagctgaaggggctgcaaccctataggtggaacaacaatatgaactaaccagtaccctaagagcttgtgtctctagctgcatatgtagcagaagatggcctagtcggccatcattaggaagagagaccccttggaattgcaaattttatatgccccagtacagggaaataccagggccaagaagtgggagtgggtggatagtggagcagggtggggcggggagggtatagggaacttttgggatagcatttgaaatttgaaatgtatataaagaaaacatctaataaaaaatgaaaaaaaaaagaagggtggattcagggtgatgaagtattttgtacttaatctagcaaaggacttaaaaaacatgtagcctaaggattgttgaaagaaaagttttaaaaaatcagataaataaatttgccctttgatgatatattccaaggaagtgattacaaggtaattaggaatatgaagaaattgactattatgtagaaagatgcagaactttcattgtaatgtaaaaattaggagttaatgtaaaatgtagttttcaaagattgcttagcttctgttaatgagaccatggatatttcttttcttattgttttcttcttttagttttaaatcatctaatgatcatattttaaaatcacttttttttgagattgtattattatcacatcctttccctttttaattttttcactccaaaactttccatgctacctctcatttcaaactcatggcctttttctctcattgttgttgttgttgttgtgtgagtgtatgtgtgtgtgtatctgtatgtgtctgcatatctctctgtgtgtattgccaatatacaaatccaaatttgttagtctgttgattgtttctatgttacttgtatgtatatgtttttcaggactgaccatccattagatattggatacacaattggcatgatcttggggaagactattcttctggctagcagcattttgcagcctttctgttccctcttccacatcagtccctgaacctttatgagaagggtttgatggtaagataccattggggctgaactccaaagtctcttgtctctgcacgttctccagttgtgggcctctgttttaattcccatctactgaaagcaggggcttccctggtgagtcctgatcagggcactgatctatgagtatagcaagatgtcaccagaaattatcttattgctatgtccctttagtaaaaggatagtagtaggttcatcctacagccaatggtttacataacctcaggttcttagccagtttagcactgtcaggtatagttttatctcactgggtggcccttaggtccaattaaatagtggttgagtgccatcatgatatttgcgcaactactgtactgtcattcgtatagtcagtaaggcatgtaactgggtaaaatcgatgactattatttttctgcattcaaagtaccttctagccccatgggtgctagacgcaggggtaaagcttctagttgggccccagctccatccttcatagtcagtagcatcagtaagtggtatcttcagcagtaggacatcactgtcagtcagtgatgggcaaccaatggcctggacattttgagggagtgtctttgggaccactttggccaacaacttaacaagatagtaacccattcctagcaccagaggtattacttgggacataatatgtcttactggggccctgtttcctccagtatgtggtgacccccattacttagtgtctacatttcaaaacatcctgttattcatataagatgagctgtgttacttcacacttattataaagcttttttttttttaatttcctagcattgtttcatggtaacccttcgcactcagctgcttttcttttttgtcatctctttttctgaaacccagttcctgtctgctttttagtagtggcattggcatgttctctttcacagtctgcatgatgtggtttgtatgggttggttttgcagatatccactctggtccttgcttcaatatagtctacctttatttttgtagaggaagcattcatagaaaaacctctaatccgcagagtcttggtaatacacatggattattttgaccatttttttaatccccttctggatttcattaattattccccgttatatttacctacattaggaatgtgtgtatgttcacttatttctgtatgaatatacatacatggatgatatgtgcatgagttaatgtttgtgtatatgtatgggcacacatatcagtgtatgtaaacacatgttctgattcttttaggttgggcactgcatatcctatctactatgcaggaacaggcactcagtcaggcacactgccctcgcttgtccttttagtccgctttcagagaatgctgtcatggcctcagactgtaccgtggatgatttatctgcaagctagcaactacactttgaaattttgatgaagatggtgtaaattgagtagtcactgtgagcgttccagctgggccagagttaggtgggtaacatttaatctcccccaaagcctgccacttaacagatagaagcatatattaggtggcagtgtaagtccattcatatgctatatgtatgaatgcagactgcattaaaatgtcactctgaggaaaatgctaaaggccaagtcagaagactctggatcaaaaaaaaaaaaaaatcaatagtgggatttacagaatgcatagtttgcagtgttcactgggattcaaagtagggatgggtaagagaagtaccatgcttattttatttccataactctaaggtctggctttgaagttggctccggggcatttccatcagcactgggccttgaaaatctgcctgctgagtcaaaggtatgatgaaaagcacaaaacaaatgtgacactggcttgtggtgggcagacacccatgactgtgttagagtgccaagctcagtggctccacagtgaagaaaaaaatgtatgccgaggggctttctgtggttgaaagctcttcatttactacccagagcatgaaaatgagcagacagaaatataaccagttagatggaagtgccgtcctgggttattttcttaaacttcaaaatgatatcaaatatgtgctttacaaagttgtgctggtagaagctatcaggtgcaggggtggggggtgggctactggggctcttgtgcttcaaaaggatacaatatagcaatgctctttttttaatgcctttttttattagatattttatttacatttcaagtgctatcctgaaagttccctatacaatccccctaccctgctcccctacccacccacgcccacttcttggccctggcattcccctgtactggggcatataaagtttgcaagaccaaggggcctctcttcccaatgatgggactaggtcaacttctgctacatatgcagctagagacacgagctctgggggtactgattagttcatattgttgttccacctatagggttgcagaccccttcagctcttgggtactttctctagctcctccactgagggccctgtgatccatccaatagctgactgtgagcattcacttctgtgtttgctaggccccggcatagtctcacaagagacagctatatctgggtcctttcagcaaaatcttgctagtgtatgaaatggtgtcagcgtttggagactgattatgggatggatccctggatatggcagtctttagatggtccatccttttgtctcagctccaaacagtgtctctgtaactccttccatgggtgttttgttcccaattctaagaaggggcaaagtgtccatactttggtcttcgttcttcttgagtttcatgcgtttagcaaattgtatcttatatcttaggtatcctaagtttctgggctaatatccacttatcagtgagtacatattgtgtgagttcctttgtgaatatgttacctcattcaggatgatgccctccaggtccatccatttgcctaggaatttcataaatttaatttttttaatagctgagtagtactccattgtgtaaatgtatcacattttctgtatccattcctgtgttgaggggcatctgggttctttccagcttctggctattataaataaggctgctatgaacatagtggagcatgtgtccttcttaccggttgggacatctggatatatgcccaggagaggtattgtgggatcctccggtagtactatgtccaattttctgaggaaccgccagactgatttccagagtggttgtacaagcttgcagtcccaccaacaatggaggagtgctcctctttctccacatcttcgccagcatctgctgtcacctgaatttttgatcttagccattctgacgggggtgagttggaatctcagggttgttttgatttgcatttccctgatgattaaggatgttgaacattttttcaggtgcttctctgccattcggtattcctcaggtgagaattctttgttcagctctgagccccattttttaacggggttatttgattttctggagtccaccttcttgagttctttatatatattggatattagtcccctatctgatttaggataggtaaagatcctttcccaatctgttggtggtctttttgtcttattgacggtatcttttgccttgcagaagctttgcagttttatgaggtcgcatttgtcaattctcgatcttacagcacaagccattgctgttctattcaggaattttccccctgtacccatatcttcaaggctttcccctactttctcctctataagagcctccacttctgtatttgccaggcactggcatagcctcacatgagacagctatatcagggtcctttcagcaaaatctttctggcatatgcaatagtgtctgggtttggtggtttattatgggatggatccctgggtggggtagtctcttgatggtccatccttttgtcttagctccaaacttttctctctaactcctttcatgggtattttgttcccttatgattcagctctaaaacactgttaaaccactgagtcatccttggctgctactctccattgtgctacatcttactgtctgctttctcttcttctttctcccattgagtcattccttggatgctccttttttttttttttttgttgttcgccatcttaccatctgctctctcttcttcttccagttattgttggtcccttttctgagaactcttttcaggaaggatcatacatttaaacatactctaatgcgatatcgaatttatattattccacttaacaattattggatgtctccaacaggcaggtgtgtggagcactgtgtgggcatggcaggactgagggtggggttgcatatgtagcttcttcttcaaccagtaactggcataaagaaaacaaagtaaatagaaagaaactcgtctgctagctgagatatggcttcttatttaaaaatgtgacctttcttttcaaggtgaattttaattcttaagcaacagccacttcatcaacttcattgtcaaacaaatgcataaaggaagatgaaaaattgttggacaaggtagtgatagtgactgaattttaggactggagtttattgatcaagtgtccagtagactcagagttcatctagatgatttttctttggtttcctaacttctgtatggaggagcctactttataattgatttctatagagagagtgaacacagtcttggccagggaggaaacaaggtctcaaaggcagatacagtaataattgcctttaaaaagttacttttcataggccttgataaaaacacatacctaaaaggaccaatacccaaaccaaaccaaaccaatacccaaacaaccaaactgaagaaaacaatccccacccgaaacctctgaaagaactggagaggtaggtactcattacacctaatcaacatgcaaattaaaagaagcaaaaaaaaaaatgctcagaggaagatatattagacctttcttaagtttcagaggtgtttacaatatttttggttgtgagcctaccctttaatggctgagccatctaaataaaaaaagccaccaaagaatgtagttgtccccagggtaatgtggaagcaatgggaaatggtgagctaccattgatgggctagccagagtgcccttagtccctttaactttccaatactcctttctctttcacactccctttaagaaatccttacctgcttgcctcagatttgcttccttgactgaatggagacgctctctacaccatggtgatgttctttccactcctcattatgtggcttgtcactctgaccagatgctaggctttcttaggtaaaaaaaaattatgtctttggaatttattttctacttttgctagaatcattgtatttgcagatgaagtttaatgaatgttgtttagctccctgaatacttccagattaaaaccttttccctttcttctcactacttatatatatactgattcgcacacacacacacacacacacacacacacacacacacacaatgggaatatataatcaatgatatatatacatacacacacatacacacatatatatatatatataatagaaatataatatataaatatgtatgtgtacatataacacatatatttaatatacatacatacacatatatcttatctatctgttgattgccctctctctctctaatgataactgtagctctcaccatttttcagaaagacttccttttttttttttttacaacagatggagaccactacagagacctataactggttaaaatgcagagaatatgaataagtgattgtgagggcccaactccaactgacatatctgtgatacaccctccatactaaaagctcaggaaaaaaatgcagaagagcagacagaaaagttgtgtgagagcgagaagcccagaatgcctgctgcctaatagtgtgttgtagatgtgacatagaaaatacacccatgaacttgtcaatagtatgactgcatgaacaaggccagcataatgacaatagcagttgacatgctaatgtgaacacaggaaatcccacctggtttcatccctatataaaatggaccagtgttgcagagaggagagagggagggtggggggagagagagagagagagagagagagagagagagagagagagagagagagagagagagagaattagtttccttcaggaaggagctcccagataggattttaattcccaagtggccagcactggacatgtgcatatgagcaatgtcaaatgaacttagtaggacattaagtgagtgtgtgattgtgtgtgcatacatgcaacagtaattactgaaaaatgagataataaagttggaagaggggacaggaggggtttgaggtagggaagagtgatttacacacagtgtacaggataatattttcaaaaacatgaaaaagcattaatggaaaaatttatttctgcttctatgatgaatatttatgtggtatattctgaaaaagctgtggaggcccagctaagacaagaagtcagaggaaaatttgtaggtatgagagtgtgaatggagaaggcatctagctatgccttaacataagtaataatgttgatacagaaatgataccatggccttacatttctctagattcttgattttttgtcaagtaacaaagggcagatggataaagggagaggcagaagtaacacagagaatggcgataaaatacagatataaaagcaacgttccaaagaaagacaatgagaactgactactgggaaaggctacagaataaatagcacactgggcagagaatcaaataaatatttacagtgttggcgtacttgaagctgttgatagatcccggcatgttttgacctgttctctaccgtatgagtcgatgatagtgtgtactggctgttctcataccctttcttttcttatttttgttcaatagaattttcagtactgatatggacttttttgtttcatatgctgtatctatatgaataagaggcgtggaagcctaagactcgcccttagtatttccgtgatttcagaacatcacaagatgcttgctgtggagactgacattacattgtacttatcgaaggccctaacctgaggttttaggtctaaaatgattatcagtgcatctggtaacttacaagcaagttctagttgaacacatgaactcatagtacttggcacttcatgcgtaagattgatacaagatccagccaacctaaatcccagcatagatggctaagaggctagagtcccgcccttatttaaagaactattggtacatgatggctgattagagagacaattgtcttcagggagcacaccctgataggctgcccatgcctagatggtccataatcatgttcatataggcatcattcaatgactatatataaagaacacataaggtaagagggggaaagagaagggaagctaggagaggaattataaatgggcagatttggtaaaaactcactatatatatgtatgactatttaaaaagttctaaagggaatgttgaatgttacagaatttttattttctgtagaactggaaagatgcacaggaaatgttcttctgctcatcccatgtcataggccatcaaaagtcttaaagtgtttacatcactgctttggggtaatgggctgctggtacgaaatggcagttgaactgtgacctcctctaacatctggttgtgttaccaatcaactgcagatcctctgtttgctccaagtgggagttatgagtagaggaaggctgcttctctggtattactgctctggtgtaggcctctggggtgcttaattcttagctctattgcaagaaacactgtagctctgaaggaggtctaggaagctgggtttcccagacactgacagcagatcttactacagcttctcagcctacagtatctcctgttttctttttctttctttctttccttctttccttctttctttctttctttctttctttctttctttctttctttctttctttctttctttctttctttctttcttccttccttccttccttccttccttccttccttccttccttccttccttcctttctttctttctttctttctttctttctttctttctttctttctttctttcgttatttcagcctgggcattctctgaaactcttcagttgcctccattcgctgctgcccctgtcgtcaccaccaccatccttatggtgactgcgattgtttttgaggttgcttcctctgctaccaactgttgtttctgcctctctgttacccttgccttcatacctgttgctgctgtagttgccactacatcattcctatcaccatctctgccttctccatggctaaggttgcatcctccttcatgttacatctaactctgctgctgctgagaaccaaatgaggctatagagatgatctgagaggagtccttctattagcgcccgggttatagtttcaaggggaggatggtgtttaccacagaatgtctcccaggatgctcacggtgaacctgtgtttatagctagaaaatgggtgtttacatcactcgtagaagacctccattcgcatgaaggactgtgcttatataccagtcatgggtcattctctttgcatgactcatagatgtcttttgctagaccacaagggggaagtgctccagttgcaagatcatctaggtttcactgagacttgtaaaggtgtcaaatccaggacaatctggttgagaacattgttatttgaacagtgtgcactttaggaagcagagttgtacttcagcagcgagcagctatggctgctgtgtagctttcacgaggcatctgtggaggagtctttaatgcgattggtgctgccttgctggcaggtcagtgatcgtggtcactcaatgaagctgtcagttaggatggcaaattgcccttgccccagaatcttagcttattttaaagaaaaaaaaacccaccaaagatatttaaatatagacatcatttacagtgaccttttaacattgtctatttcctgcctgacaccccggggaaatgggtctcctttatctcagagggttgaactgctcttcagcatttgttttgtttagagatggtacttacctcaagttgaagggtagatgcgccacctactaagacacaccagtataagtaaaactttgaaagcaggctaccaaaggtctgagtgatagagtgtgaggtaaatcctcatgaagtcctcagaaggctttggctgtccccaagagagaagagagattcttcctaattaaataatgttcctgttgaaaacaatgttgtagaagcagagttttaatctggcagtctcttgctgccgaaagcatgatcagcttttcctcccccaagatccaggaattaacccttgatctgcgataaccatgctttttccactgcacatttccaagtattgcagggaactcttcccatgtgagagtggagacacaattccagcgaaggcaggaatagtggcctcagtgactgggaaaatcatttaatctcttccaccctcagtaaccgcagctataggaagggacaattacatctatcatgtcttagaatggtgatcatttccatcgctacctgacccatggcagctacttgctgatcctgtggcatttattatcataagtttttcgtccgttctgcatgactggaatagtattgtcacccatgttctatagctgtgaaagctgtggctcaggctacttcagtaactgctctataaaactttgaaagtaattaaaaaaaatcacacatgagaacattttgaaaacctcaaagctttctgcaggtgtatgttgatattgatggatgtgaaataggtagtgtgtattcattgagtttcttacaataaatgcttaacactgagatagattttaattaatctgtgaaatgagagatttcccctaatgtatattatataagctgtattgtaagcaaaatttaaatatacccaaatgaaagtctctgccatgcttaggatcaggcgtgcatttctgtttcactgtttttagaggaaaggagtaatgaaacaaacttactaaagttttaagaaataaaaaaccaattgcatataactcagccttcatgtaacagtcctcaaaatatgggtgttgttataaaaacttcagagaagaccagagaaagcttctacaggccagcagacatctgctgaaggttcattcaccatctatgctactgaccagcagtgtaacctctcctctacatctagctcttggctgtttatttttttagtctataatgaccaacaggattgttaaaaacttatttgaaaggcttaccctggattcagacgcataaaacttcctgtgtgaggacagctgggaatccacagaacatccctaaaataagcaccaaggtttggaaaaacaattttctcttttgggaagcaccatcctgtttccatagagaggcagcagcatacaatatctgtttcttaccaaggaagaaggtaccggagtcaggttatcagggagccaggagctaacctccacgacagggtaacattcaaaaaggcttttcccttggtattttccaagatctcctaacatgtcagtgaaagtcaatagagctctacacagggatcagctgagcccagaattgagctgtgctctgcttcctgtgtttaaggttcagataaaaagaggaaggagttgtgaaattaaacttacacatgtaccacatgtttgtcttctggcatagaccaattcccaccactcaatcaaagccttttttcctgaatataccttccagttgttcttaaagacttgtgtgttctattctgctggcctgcgcagatatttgaagagatcaaaagaaaatgcattcaaatcgaggaaaggtggagggcatttgatctaggttttatcaaacatttttgatggatggaatatagttttgtatatgtattttaagagatacatgttgggaccagcatgatatgtatgtatgtatgtatgtatgtatttacttccttatttgtttgttcaattgtttatagttattcactttatatcccactcactgccctcttcctgtttaccccttccacaatccttcccttatctcccctccccttcttctaagatcaggtagaggcccctccttagtaggccccccaacatttcaagtttctgggagtctaggtgtttcctctcccactgaggccaaacaaggcagtcagttagaagaacatatctcatatacaagcaacagctatgtgatagccaacgttctggttgttcgggactcacacgaggaccaagctgcacatatgctacatatgtgtggggatacctaggtccaggccatgtatgttctttggtgggtggttcagtctctgagacccccaaggatccacgttagttgactctgttggtcttccaatgaagttcctattcccttttgggctgcaatcctcccttctattcttctgtaagagtcctcaagctccatccactgttggactgtgggtgtcttcatccttctgagtcatttggtagatggtgcctctcagaggacatccatgctagactcctgtctgtaagcataacagcgtaataatgtcagggattgatgcttgcccatgggatgggtctcaagttgggctgtttattggtttgctattccttcagtctctgctccatgccctgtccttgcatttcttttagacaggataagttttgggtgaaaagtgttgtgggtgggttggtgtccctatccctccaccagggttcctgactggccacaggaggcagcctcctttgtatccccaatgctatgagttacagctaagaacacccacatggtttcttggatatcttccctatcctaggtccttgtctcttcctagagatgccccctactcccctgacccctgattagttacagattttgattcattcttatggtcatccatccatgctccctgcctttacccacaccagacctggaaactctgcaggccacttccctcccaattcactttcccacccacatcccttcctccatctgccttccatgaccattacactcccctttgcaagtgagtgccaagcatccttgcttatgccctcctccttgtccagcctccttgtgcctgtggagtatagcatgggtatcctgtattttatagctaatatccacttataagtgagtatataccatgaatgtccttttgggacggggttgtctcactcaggatgatattctcaagatccatccatttgcctgaaaagccatgatgtcttcgttttccatagccagcatgattcttaaccaagtgagaaataatgacttgatacttattttgggtctcttgagttgtgtgaatgttggagccactcattcctgagtcttttttaaaaattgtaggtgagatgtgatagcacagcttcgttcagttcttctgtcagggatttggccacattttggtccatgattgaaggcatgaaatcctctggaaggacctgatgcataaccaagctcagctttccttcagccagagctcgaatttggttgaaccttagtagacaagctagactaaacaaaattaattatagaagtgatatttacaaagaaaatgatgggtatcctccctacttggctatgtgtgtttggtcactgatttggagtagaggatctttacaagatcttacgtttccccccaagctttctttctacagctagccagaactatgccataccttagaaatgaagatgctggttgtatggcttgtctacctctgtgtacattcctggtcctagggtaaaggtattcctcacagaacacttttttttttttaaattatgaacctttgtacttggaaggtagaattaatgtcttaatttctggagactcaacttgagctctgccttatctctggtcagtttcatttgatagaatgagccttgctcagggagtcagggaaattattctctgccagctgattttagataggttacttaatactgagtgctgccttcgtgatcctcagagtgagggcatctcaggtaagttccttctttacccttgtctgggtataggtgtgtgtgtgcacatccgtgtgtgcctgagtgtgcacatgcatgcatgcatttgtgtgtgtgtctgtcctgctccggctccccatttctagggatgtttgtccaaacttgttggcctttcttctaatccaaatttctctatgcataaaaagaagaatacatctgagtggggcattgtttcttgtgagatgaacaacagctgataaaggcaggggattacctacttctgaagcagacaaggaggagtttatggctttgtgctttttctatgtaaccagtttttcttcttggaatacattttatggaacctgactaatcaccctggcaatatgtttccaaagtctttttggctgtagatcaaagtgtctactattccagcacatgaactctgagaacccagacaatacgggctcagtaaggagccagagaaagtatgtgtaaggaattttgtctctagactctgatataacggtagaaaaagaacaaggataatgaattgagggaatcattgtgagtggtcagtgcatagaaaaagatgccctaacccccttaataatcaaagaagtataacatggctaaatggatttaccccatcctttttttttttcctacaggaatgtaaatgttgaccaaacatgctgtactatatctctcagtctggaaaaaattagaatttttttccctttggcagctgccaggtacagtctttttgataagtacagccctacaaattatatagcttctttgctcggcaggtcttagtttaagatttatctgtaggaggtaactacataatatatgcacaatatacgatgtgtctgcagaagtgcattcatgtaggaaaacagaaacaatgtttatcaataggagattggcataatatagtgtagccaatacctactgcaaaatctcatgtagtcagaaaaaccccatagtgtagcactttaaatattgccatggggaatcatttggtgatgcagaacagggtctttcctctaaggtgatgttagtagaaacgtgacatgtccacttaaatctcaacaggaacaaccggaatgcctgtacttaagtttccaacttaactcccagctgtgtgccttacccactctgtcctgagggaggcttacataaactctcttattcttagtaaaaatgaagataataaaaccatcttctttgaggtttactgtgtgaatcaaggaataaaacacatgtcaaggacttgggagggagtaaataaaatatactttgattccacattcattcagagtttcaattttcttttcattatgtaagtacaaacagctgcgttcttatgctcacagttcaaagggagaaagctaagtggggtttgaatagcttccatttattttagtgtaggaagagtcctagttccaagtatgtgaactagtattttcctaaggctacagactgccagaaaatagccttattggatcattgttttctggagccaagagaggtgattgagtgattggcgttgatggacagctaaaataatattgcattcttgccatccttaggcactttagcaccaagggatttcacatagatctgctgttcccctcttggtttggaagaacaaggcttttgttatttatgctcttacataacagagctttatcctatgccaaggaggacataaaacaaagaagtcctcatgggtcatcccacctaatagaacgagctcttctaagtgccttcaaccacctgcagagggcctacatcatccacaaagggagataggcaggcttgtagaagcacaccagccaaacaggggtgggactcagttctgtcctattgtgctggagttagtagattcagccacctggaagctctccttgggtccatttagttctaaaaaccaaccaactagcaacccctcttttttctgtctgtatctgaggttgaaaatgaaacagtaatatactgtatgcttttactttgaaaagttctggtcctcgggtaattattttaggtaattttgcataatctttttggaattgttgacaaggtagagtgggggacaattgggactcaatggcttttccccagtagttaaagggtcattagcagaatatgaattagacagtgtcctatattcctcctcttgtttctctctcctgcacaaaacaacctctggcttgtttccataccatcacacccatgtgtaacttttgtttagccatcagtcaagtttaaggtgaattggtgaagctggaattacttctgattcctagtcactagtcagctcactggtcagtattaagaacatattcagactttgtgttctgtgttttgcacacgttgtcttgatatttctagagggtggctccccgtgcttgctctctagactcgtgctcttggcatcctgtagtgggaaccagggatttctgttgcagcaaatgccttggtgttcgttatagccttatgcacatgaagtttaaaggctcctgttatagatagggatcagaccccatctccttcagttgctcacgcttgcaaatgtgcctcttcagctaagttaccttccaggagatacatacctgattgtattatagaagtgagaaatctgctcttgctggatggtgctatggtggagaggaagactcacaggccacagggacagagcagagctatgtaggactctctgaggtggccctgcatggagaggtaaaaattggacatttttcctggtccagagctgtgaatacatggcagatttgctcctaagagaaagtttctgatattgcaatgtgattctcggtcccagaaaggcacatctgtcttttgtatgtcttcttgtcatacctgacccgactgctctggggataggcacatattcattcagttgatgagaggatcagagaagctccttagtgagctcttttggtggagggggtggtcacagagggaggttatattttgggggaacaaattgattaggagagttcctaaggcaatttctacctgggttctaatcatgggatttctgtattactttttcattcctgatacaagttctttagctagtaaaaggagatgtattttcacttatatttttaacatttgagttcaagatcatgcagatatttttttcacagaaaggacatacacaatccattttggttacacccaagaaccttctactgaatgtcattttaaatgcccttagtacctcctgctaccttgggactcaggtagtctatatggacccttggggaaacctcatctaacccatagtggttgttctctgatacctaactcttagaaaattctagctgttcacacaatcccctccttcagtgggtatccagtgtaggtagtttatgtccatgaactgtgacaatattgccattcagatggtaaagcctcagggccacaagtgggtttttagaaggagaaacttcatgatttatggcagctaaaccaacataggggaagtgggaactaattgcctgtttctgagttctagccacccctgatctcccagtgtgttctgcctggagcaggataatgagaatgaatgagatttagcttagcttattctactctttgctaggccccttataaagctttaaaaatgtaattatttctagcaaatatagtgagctccatggcatttctttatcaacttgagaaaaaccacaagtgattttcaaactctagcaaagattttgctggtaggtctattgatttcactataattctggaatttctctgtattcgttttgaagggttttttttccccctcctaaattgaaaatggccttcactctcctcagtgtttactttcttttagaattgaattctggggagaggtattgattccttaattccttataagcatggagtaaccaaccatcttccgtaagaggtgaacaggagtgggctcatggtgaaggagttcattgtttttatcttgctgatggcatgtgtagaggcatctgcattttcaaaggctcatctcaggaactagaagcaggtagatgtggctggtgggtaattgtatggacgtagagaaaggtaaatttgaaggtcttctatgaatgagtgaataaattaatgaacagacaaatgaatgaagtccacgctccatcctgagggaggtcgtccctcttccaaattgactgacccgttttccttcagtttatcagtgagaatattaaaaccttagctaataatctcttgctttgagaaatctctcatctaagggtggaatggaataattagcttcaatgttctctcatatttaagctggaaattcagtgtgaattgagacatggcttatgtattttggataatcagcacagctgttcaggatagatacccccccacccccaccccccacacccattcaaatcttttttggttagaataccatgaatgaaaattatgggcaccattattattttctcttcatgcaagactatttttttttaaacatgcctgaactctgtgctaactattctacgaatcacgtctgctttgattccctcttctttgtcacatcctgggtaggtgtccttatgggatgcatcaaaggtggagttggtttcaaagttcatgtgacagccaggtagaaggctgacaggagcaactcacatctcactggactttgatctcaaagatcttaagacaaacatggtatttttaaagttacctcagatgcagtccgtgataagagtggatccatacctaagcacgtggatgctgagtgattcaccttcattttgtatattgagcacagcatgacaatgatcttaataatgaaaacaataaaatgataattctttttttttttttaagtgctgttaggtattgtgctcaaactcccagtgaaagaccagagctggaatttgaacctagatagtctggctccagagtttatgccttctctgtctgtgtggtagtgtttgaggccttgctggaagcatgggtgtggtttaagcaatatgttaataacaccccccccaacattttctcttactaaatctctagactttgcatatttcattacataacacttcagagaggccaaaagaacgtggaggaccacagaaaaaagtagatttttctccttcttgtcaggtcttatgctgaggaagaattcttgacttaccacaattcatgtttaagtataaaaagatggcagttttcattaagcttatgtgtgatttatcatgtaatatattttgaaatccttttcacatacattattactataattccatatgttcaaattcttagagaagactgaattaaaaaccattttgttaagcttagtgtaatgcattttagaaatttgtcacatagattattggtgtgattccatacagttatgctcttaggagaagatggattagaaatcaactttagggctgggattgtggctcaggaggagagtgtttgcctaacacggggtctggatgccatcactgtctctacaagaaaacaaaataaacagagaaagcaaagataaacaataaaaacaaagccctcattcaaaagtctccccatagggggagcgtacattggatttaaaatctccatgcaaaggtaaagtgttacataactcaagaacgtgtcggtcctcaaagtgacaacagacttgtatctttactgttgttcatcctttaaattacatttctcgttatggcaaggcaagtcttgctggtcttttttttttttttttttcaagtaaaactttcctttgcgtttatatcatatggtgctggttgtcagctgtttcctaccgggggaacaggttctgatgtctaggtttcttggtaatgaggttagcattatgataacaatatggctgtttgtccctgtcacatagaatggagttaatgtcctatcggtttgttgggccaacatggtgaatcagtcacttgcgagtaacttctttggctctataaagtacagtgctagacagattagctcatgagcccataaatcactcttggcccaagttttgggaccattttcagccagccatagctctgatatttgagatttgctgatgctcttgggtcagaagagaatttatgatcttcagttgttggaattgtcttcatcattgtctctagagttgagatcaatgaaatatggacaaaaaagtgaattcagctgtctgggtgacctttggttacacaatagcgtgcgcaatagccaccagatatgaattgatggcagtgacaaggtcatcaagccagtctttcaagccagagcccctaatacaaggcctgctggtttgagagtgatacctgagagagtcaactctgacatgtaagactaacaattttaggcaaacaaaacaaaacaaaacaaaaaagtcaaaaaaacaacaacaaaaaaagaaaagaaaacaaaacaaaaaaacccaaaaaacctgatatatgatttttattttcttcttccctgaattgtctttaatagggtacaggaaaatgtgattatacaatcagctcaaattgaatcatctttcataccaagacatctcttgtggttcgatgttgacacttttaaatccccaggaaaatctcctgttgcaggagccatctcacggtatcatggtatcatgattattatagttctgggaggggaaggctatggagatagttttgaaagctcttagcactagtgtatttgagatgaacgttaattattaatcaatgaaccacttggaagtaagtcggtcaatgcttgtaatgtgcgtgagggtcagggagccaggggttagttatatgttgaaagagtagaatgtacaatagctgttaaagccccattccggcactgtcccattgctctatggctgttggccactgtcttggctggtgagacaatgttctgttgagttgaaggtagtgagttctttcagttggaaatttctggatgaaaatgagcatgtactaacttccatgtctcactttgccaccaggtatgttcagcctgttgcctgtgggggtgcatgcatgctgggatagctatgcatgggcccaacacaagatggccagtgttctcaaaacagtatatgattcttggcagtttattttgtaactcaattgtgtagtttttgagtgtaaattttgagcaatgactaaaggtttaacagctctggtgaccaggcttgtccttgtctgattaaatgggcagttgaaatgaagagttaaagggatttagttagattttattactaggtaaaatcagagagtttgaatggaggattcaacaaccttaagttgcattccaggccagcatgatctacacagtgagatcctggacttccaggactgcacagagaaagcctttctcaaacaacaaaaacaaaaccaactacaacaacaaaagagagttatgtctttttcatttcaagctaatttatatttccgttgagtcaaagggacaacagttttaacaccccctacttagaaatttctgttctctcagacttacaataggcagcagcactgtcaaaagtttaattaaatatttagaaaaaatatttaaacatcgaaatactattttctggatagtcacaagttggacaagtcaaagaacaagtcctaggaaggaattgcccatggatatatttttctgttctctgtattttgctcctttctttctatttttgcatctccagttgaattcagtcgattatctgtaacagaccaaaagcatgcaagtgtctcttccattagtatcctttatacttggtcaccaacgaagcagttttcttctccctttaagaggttgttaaatcaaaacacaaattaaacacttttaatgatttgaaagggtttttttttctttgtttgtttttgacaagcgcttacatttgctatacattttttgaaacattcatatttattaccaggaaaaggatgttaagtatttaaagggtgtgaactatgtgtgtcttgtttcttcctcttcttcttctttttttttttgtatttaaattctttttgcttatctttgtagtagtttcaaatattttcataggatctttaataaataataactatagacatatggcatagtaagcatcaggtgtaattagtcgctgaggtttagtggtaaataaggcagatgttatagagggagatagtaaaactctgcttctaggagcattgcaaagtcccttgatgctgattctgaatattcttagcttcagtcttctctccatggaacattcttgtgtcccaagagtctgaggccggaggagctgggcaacagtttatattccctgctcagcttttgcacagttatttcctgtgttacagaagcaagcagtcgggtctctctcctcccggtttgccgggttgagccgcgttctcagcagtacatgaacaggctgtgtggctgttctggaaaattacctattttcctaccccggcacacgttatttcagggacacaaacctccctggactcagtaacaaatgacctatgaaaagcatgggacatagagaaaaaaaaatgaaaataaaatagaagcttatttagttgctcaagcaacttagtggttatcatttcctttccgcattattcctgctaacaataaaagggaagctgaaggttagttacctcagggtttggctgcaggctcgccctttggtgtctggagtggctctggtctgtacttgctgggactgccaggccaggagtctacgctccagcctcagactcactcggtctgtgccagaccacctgtcctccctccccgagatgatgaagctgggattttttttcccctctctggtctttgcaggcaaagtaactgtagatatgcaatgttgtgtagagtcacttctctgctgtgttccagcgcagcccttagctgtccagagccagttagacctgttatgaggagctagctaactgattggctggatcccggctcagtttcatagattatagcccagcggttgggaagcaccagccctgtagttgctgtagtcccggcttgccagttcctgtcttaatgcatatgttgttgtaattgagtcctagcacagcctaaatagctgacattgcatcttcaagaccgtgtgagtaatccagattttttttttttttcaaacctcaggaaattaattacatgccccgggagggagtgattataaggagaaaatacagatgattcatttttcaaggtgctttgccttatgttcaaattcaccgcggtgaatctgaaaggttctaggacctggcagggttagtcttgctcttcctcacagctgcccgttggaggcatttgttagttctgcttgttttatgggaatccataaagtaataaagtccaatacctgcaggttgaaacagaaggcagtgatctcaaagcagagactcagagagacggggcaggcaaacggcagggtttcttacttgccctgctcacaactgtgagctgtaaggaacctctcctttggggtcataggtatacagcagtgcagttagagctccggaaaggagacaggggaaacgggggctggctggagtggttttttgttttttgttttttccctctgcaatctgaagttaatttaagatgcacaccacgagtaactaacagaattatatgtgtgtaaaaatgctttggtgggtctgttgatttggtagaaggctgaacaggaaactaggagtttattttcaaatgctatgtgagaagcagattaagcacacacagaaccctgagggaggcaactctgtggattagaatttgtggttggagcagatcaagttatcctaggaaacctttgctcgtgttttttttttttttgtttgttttgttttgtttttttgttttttctttctgggataacttttgtagttaacaaggtttgtgataaagctggagccgactgacatgagaaactaggagacttcagcctctgttctctcctgcaggacatacttggccactgaaatcactctgagtatgaactggtaaatgtaagcggttcatgttttacttataaatcactgttgatctcacctggtctttaacacacagaaatgtgataacagggctttgcttatgcagttagtgcctatgggaatgtatatatatatgtgtatatatatatatatatatatatatatatatatatatatatatatattccttctgagtacagctcaaagcaacgatatttcttgcggttttgggtggctttccaggttgcttttcatccaatttttcctctttagaattgtagattcaaatccatgtatttatgctatgtatgtcttaagcaccaataatttgatgagttttaaaaccctgagtttccacggcaaatataaactcctaataactatagtaattactcgccaggtcctatacaaatagcatttacagactcaaagcagtttaattttgcttgtatctatttaaacagctggcatgattaacctataaaagaaatatattcattgtggttttaatatttttaattttagattgaatttgtttcatctatctatctatctatctatcatctatctatctatcatctatctatctatctatctatctatctatctatctatctatctatctatctttgatgtctgaactgccaacccttttagatcaaaccaggggataaaatccatcaaaagataagttgtcaacatagatttcttgtctgtatcaaccagatgtacataagatannnnnnnnnnnnnnnnnnnnnnnnnnnnnnnnnnnnnnnnnnnnnnnnnnnnnnnnnnnnnnnnnnnnnnnnnnnnnnnnnnnnnnnnnnnnnnnnnnnnnnnnnnnnnnnnnnnnnnnnnnnnnnnnnnnnnnnnnnnnnnnnnnnnnnnnnnnnnnnnnnnnnnnnnnnnnnnnnnnnnnnnnnnnnnnnnnnnnnnnnnnnnnnnnnnnnnnnnnnnnnnnnnnnnnnnnnnnnnnnnnnnnnnnnnnnnnnnnnnnnnnnnnnnnnnnnnnnnnnnnnnnnnnnnnnnnnnnnnnnnnnnnnnnnnnnnnnnnnnnnnnnnnnnnnnnnnnnnnnnnnnnnnnnnnnnnnnnnnnnnnnnnnnnnnnnnnnnnnnnnnnnnnnnnnnnnnnnnnnnnnnnnnnnnnnnnnnnnnnnnnnnnnnnnnnnnnnnnnnnnnnnnnnnnnnnnnnnnnnnnnnnnnnnnnnnnnnnnnnnnnnnnnnnnnnnnnnnnnnnnnnnnnnnnnnnnnnnnnnnnnnnnnnnnnnnnnnnnnnnnnnnnnnnnnnnnnnnnnnnnnnnnnnnnnnnnnnnnnnnnnnnnnnnnnnnnnnnnnnnnnnnnnnnnnnnnnnnnnnnnnnnnnnnnnnnnnnnnnnnnnnnnnnnnnnnnnnnnnnnnnnnnnnnnnnnnnnnnnnnnnnnnnnnnnnnnnnnnnnnnnnnnnnnnnnnnnnnnnnnnnnnnnnnnnnnnnnnnnnnnnnnnnnnnnnnnnnnnnnnnnnnnnnnnnnnnnnnnnnnnnnnnnnnnnnnnnnnnnnnnnnnnnnnnnnnnnnnnnnnnnnnnnnnnnnnnnnnnnnnnnnnnnnnnnnnnnnnnnnnnnnnnnnnnnnnnnnnnnnnnnnnnnnnnnnnnnnnnnnnnnnnnnnnnnnnnnnnnnnnnnnnnnnnnnnnnnnnnnnnnnnnnnnnnnnnnnnnnnnnnnnnnnnnnnnnnnnnnnnnnnnnnnnnnnnnnnnnnnnnnnnnnnnnnnnnnnnnnnnnnnnnnnnnnnnnnnnnnnnnnnnnnnnnnnnnnnnnnnnnnnnnnnnnnnnnnnnnnnnnnnnnnnnnnnnnnnnnnnnnnnnnnnnnnnnnnnnnnnnnnnnnnnnnnnnnnnnnnnnnnnnnnnnnnnnnnnnnnnnnnnnnnnnnnnnnnnnnnnnnnnnnnnnnnnnnnnnnnnnnnnnnnnnnnnnnnnnnnnnnnnnnnnnnnnnnnnnnnnnnnnnnnnnnnnnnnnnnnnnnnnnnnnnnnnnnnnnnnnnnnnnnnnnnnnnnnnnnnnnnnnnnnnnnnnnnnnnnnnnnnnnnnnnnnnnnnnnnnnnnnnnnnnnnnnnnnnnnnnnnnnnnnnnnnnnnnnnnnnnnnnnnnnnnnnnnnnnnnnnnnnnnnnnnnnnnnnnnnnnnnnnnnnnnnnnnnnnnnnnnnnnnnnnnnnnnnnnnnnnnnnnnnnnnnnnnnnnnnnnnnnnnnnnnnnnnnnnnnnnnnnnnnnnnnnnnnnnnnnnnnnnnnnnnnnnnnnnnnnnnnnnnnnnnnnnnnnnnnnnnnnnnnnnnnnnnnnnnnnnnnnnnnnnnnnnnnnnnnnnnnnnnnnnnnnnnnnnnnnnnnnnnnnnnnnnnnnnnnnnnnnnnnnnnnnnnnnnnnnnnnnnnnnnnnnnnnnnnnnnnnnnnnnnnnnnnnnnnnnnnnnnnnnnnnnnnnnnnnnnnnnnnnnnnnnnnnnnnnnnnnnnnnnnnnnnnnnnnnnnnnnnnnnnnnnnnnnnnnnnnnnnnnnnnnnnnnnnnnnnnnnnnnnnnnnnnnnnnnnnnnnnnnnnnnnnnnnnnnnnnnnnnnnnnnnnnnnnnnnnnnnnnnnnnnnnnnnnnnnnnnnnnnnnnnnnnnnnnnnnnnnnnnnnnnnnnnnnnnnnnnnnnnnnnnnnnnnnnnnnnnnnnnnnnnnnnnnnnnnnnnnnnnnnnnnnnnnnnnnnnnnnnnnnnnnnnnnnnnnnnnnnnnnnnnnnnnnnnnnnnnnnnnnnnnnnnnnnnnnnnnnnnnnnnnnnnnnnnnnnnnnnnnnnnnnnnnnnnnnnnnnnnnnnnnnnnnnnnnnnnnnnnnnnnnnnnnnnnnnnnnnnnnnnnnnnnnnnnnnnnnnnnnnnnnnnnnnnnnnnnnnnnnnnnnnnnnnnnnnnnnnnnnnnnnnnnnnnnnnnnnnnnnnnnnnnnnnnnnnnnnnnnnnnnnnnnnnnnnnnnnnnnnnnnnnnnnnnnnnnnnnnnnnnnnnnnnnnnnnnnnnnnnnnnnnnnnnnnnnnnnnnnnnnnnnnnnnnnnnnnnnnnnnnnnnnnnnnnnnnnnnnnnnnnnnnnnnnnnnnnnnnnnnnnnnnnnnnnnnnnnnnnnnnnnnnnnnnnnnnnnnnnnnnnnnnnnnnnnnnnnnnnnnnnnnnnnnnnnnnnnnnnnnnnnnnnnnnnnnnnnnnnnnnnnnnnnnnnnnnnnnnnnnnnnnnnnnnnnnnnnnnnnnnnnnnnnnnnnnnnnnnnnnnnnnnnnnnnnnnnnnnnnnnnnnnnnnnnnnnnnnnnnnnnnnnnnnnnnnnnnnnnnnnnnnnnnnnnnnnnnnnnnnnnnnnnnnnnnnnnnnnnnnnnnnnnnnnnnnnnnnnnnnnnnnnnnnnnnnnnnnnnnnnnnnnnnnnnnnnnnnnnnnnnnnnnnnnnnnnnnnnnnnnnnnnnnnnnnnnnnnnnnnnnnnnnnnnnnnnnnnnnnnnnnnnnnnnnnnnnnnnnnnnnnnnnnnnnnnnnnnnnnnnnnnnnnnnnnnnnnnnnnnnnnnnnnnnnnnnnnnnnnnnnnnnnnnnnnnnnnnnnnnnnnnnnnnnnnnnnnnnnnnnnnnnnnnnnnnnnnnnnnnnnnnnnnnnnnnnnnnnnnnnnnnnnnnnnnnnnnnnnnnnnnnnnnnnnnnnnnnnnnnnnnnnnnnnnnnnnnnnnnnnnnnnnnnnnnnnnnnnnnnnnnnnnnnnnnnnnnnnnnnnnnnnnnnnnnnnnnnnnnnnnnnnnnnnnnnnnnnnnnnnnnnnnnnnnnnnnnnnnnnnnnnnnnnnnnnnnnnnnnnnnnnnnnnnnnncagtagatatttatttcatgtttgcagaacttctgggtctccctacgaggtggcttctttggatttattactcttcgcctaagtgttgagtgtggccgcagtgctgtgtagaactttttgaatagctagtcctactattatatttagttctattattatgtttagtcctagtactatgttttttagtccaaggaatggcaaggccaacatgtcattgggtttgtttaattttcacacacacacattagaatgtttcacagagtctgtagtacaaaaatcctaacccatggtttcagtttctatgatttccattctgatggcttaacagggtctgaaagtgttgaatgacatttccataaatgcacagttcataaactgtaaattgcacacataccaaatagcatgatgtcaggctctgctctgccccaggatgtcattatcctatgtccagttactcatgctggatgtgtatccttcccaggagtcagtcagtacttcacccacttctaggacatctgtgcagatgttacaatgcttctgttcaagttgtatctatttgacttaatgttggtctcagagtggaagaacggtgttgttggaaatttggatataccaaagagaagccataaagtgcttccaaaaggtaaacgtttgttacctgatgaaataagtaaattacatattgagaccactgaggtcttcacaaagaataaatgaagtaatcatctatgaatatgctttggtaacattagcgactatgaagaaatgaaattgttctgtgtttgtagccacatcttagactgcaaaagttatggccaccatacatgatgcatgcttaataaagaccaaaatggtgctatatttttgcatatatgtacataaaaaatcagtgtgcaataattagtgtggcatccatttaggtgtcaaggagatacagtgcatctcttatagatgcagggagggactactcaatacaatataactctgttcactcaccttattttaggatctcacatacctgacaatagacttactgcataaaaccgtgtttgcatcttttgtagctatgataaccacttgtgagcatgatatttaatagaagataaatgcataaaatgtaagatatttaataatgatctaaaattgacaggaaaggagtaaaatgttatcattccagaaaagccccatttttattatggacatttgattagtttctgtaacgttagctactataataatatttgcaatttcggtggctttgcccagaaatttctcattcctctaaagcccaaagtgggcatcaccctttccacatggtatctctgtgagaatttaatacattttgatgatttcttacttgtgtacagtgtattgtggccatattattcttacccattagctcttggctttggccattcctccgcacatgcgcattcattaccttttttttttttttttgtctcagctgctccttctcctttcatgtgttggtgtgtgattgagtgtgcatgggtttgtgtatgcagatgtgtttatgaatatgtgagtgtgtgtatgcaaatgcatgtgtgtgagcatgtgctcttgtgtatgtgaatgtgtgggagcatgtgtgcatacacatgcaagtgtgaggtgtgtgtgcatctgtgtgtcaatgtgtatctgtgtgggcatgggcgggtgtgtggtgtgcacattagttatgtgcttgtgtgcatatgtgtgtgtatatgtgtatgtgtacatgcatgtgtgatttggtatgtgtgtttggtatatttgtatgtgtatgtcagtgtgtgtgagcatgggtgtatgagtacatgcatatgtgtgtatttgtgtgattacacatgtgtgggtgaatgggtatatttatacgtatttgtgcatgtgtgtgcacctgagtgtgtgcatgcatgcctatttaactgtgtatatgtacacatgtgtttgtgcacacgtgtctgagtacaatatgtgtatgctcatatgtgtacatgtgagagaatacatgtgtgtgtttgtgcatgtgtatgcatgtacatgtgtatgggcatgtgtgtatatgtggtgcatgtgtttgtgtgtgtgtacctgcatgaagattttatgcaggctgtcacaaacactgtgtgtttgtgtgtgcatgtacatgtgcatggccatgtgtgtgtggtgcatgtgtctgtgtgtgtgtgtatacccatgtgtgaaagctttatgcaggttgtgtgtttgtgactgcaatagccgggttgtttcaagaagactctgccttgtgatactccttccctagtctctggctcttgaagacactccatcaatatttatttagatttaaaaactatctttagtgatgatgatgataacgatgacgacaatgccaatacgctccaccccttctgtggtggagttcctggggtgattatgtcattactgagtctgtgggcaaatcttgactgacaggttggtattgtagaacatagggtccaaagttgggttttatttttgatgacctttctcctttaaagcttgtatcatggtgaatgtgagtcaatagagacaaagcctccagctcagttacagctgaattctctgtatctaaagtatgtattgttttcagctttttcagtaatttcagaatgactgtctaatcctgatgggccataaaaagcaatggcagcagtctattgtcttggagacctctggggatttcctgagcaacaaatcacagggagatacattatacctggcaatggggtttttgtttaaagacttactactacttctttttaacaaatcgttttatttgtttacatttcaaatgttatcccccttcccggtcggtctctactccattagccctccctatccctacttacttcttctggaagcaatattatctgtgaatgccagagagttctgttcaacctcatcctgtaatcttttgatgagcttataaagtggtcggttcctatatagctttcttttccaagcattcctgttttatctggctctccctgtcatgcccacacattctccacacgctgctgcacttctcctcatttaaaccttccacctgtactatccactcctccactgaatgcagctacttgatcggatctctctcctttactcgaatgatgctcttgtggtgccattctcaacccatgccaccgccagctctcatgtgctgtgctctggcaaggaagcaacctcctgagcttggtcatctgtctcacctagtggatgggccatgggctcatttgtgtcaggaaggaaaagcaagttggtatggtattttctttaattgaaatgtatatatcaaggtaccaacatatcagagctcctgggtggcttatatgcaaaagaaatttgtttcttcttactttcccgtgaacagggtgccagcatggttgggttctggcaagggccaccttctaggctgcagatggatgacatattgttgtatcgtcccagttttaaaagagaaagctaactctctggattcttataaggcaatgccctttagcaaggttctgctttaagatgtaattacctcttaaaggtctcatctccaaatgccatcacgttaggcattcgatggcaacatatgaatttggaagaaataaacattcaattcacagcactcatcaactaacacttttctgtcgtaccttcatttctatttttaaaatttctctatttccaattgtttactatgtcttcataaaatataactcttataataaatagtaagttaaatgagaaatatcatagttttctttagaaaaatatcagagatataatttaacacttaaattttttatccatatgctatgcctcttcctaaggccagtaaaaataactcaacactatgattacaaagattgctaccatttaaggaacctgtcctattgtgcaaagtgtttctggaatgtttctctctccctacctttccctcccatgggtctggttatttcaatgtcttactttcttgtctaaaaaaatagtttggagaaaattaacaatgttaacatgacttatcacagtggagccattcactacaattttctttatagacttggtgtggattcttactagtagaaactgctccgtttccctggggattatctgcaaaactcttgtccatacccctcctttgtttctgcatgggctttagccagtgctggaactaacataaatttggttcaaagcctttctgttttctggaagctaaagcctgtctactctgaaataccagggtctaacacattcatatcacaaatataaaacaacatagatatctactcaatgaatgaaaaatagttttcaaatagttgcttttaaaaaaatcccccctagaaccttttaattttctttcaataaaattccataaactgaattcatcccttctcttggttgtagcaggatcagatattttgttgggtgttaagccaatcataacttcagctgttctaaaaaccaaattacttctctttcctgtaaagcaaatttacaatcaggctatttaaaaaataaatatgacaaataaaaatcccttttaagctttacatcctgacctagaaaaccaaaccaaagaactggctcattttaacatcctcacatttatctgattgaactgagagtgttggaaagaattttcccatcactccagacacttgtttattttctcagctcattccaaaaacattttaagtgcaccactgcaaannnnnnnnnnnnnnnnnnnnnnnnnnnnnnnnnnnnnnnnnnnnnnnnnnnnnnnnnnnnnnnnnnnnnnnnnnnnnnnnnnnnnnnnnnnnnnnnnnnnnnnnnnnnnnnnnnnnnnnnnnnnnnnnnnnnnnnnnnnnnnnnnnnnnnnnnnnnnnnnnnnnnnnnnnnnnnnnnnnnnnnnnnnnnnnnnnnnnnnnnnnnnnnnnnnnnnnnnnnnnnnnnnnnnnnnnnnnnnnnnnnnnnnnnnnnnnnnnnnnnnnnnnnnnnnnnnnnnnnnnnnnnnnnnnnnnnnnnnnnnnnnnnnnnnccctctccaactccctttagaatctcccctctatctccatcccaactttttaaaaatataatacactgattcatccatttgtctctgcccaaatgcacatgactgtagtcctatgtactagagcatgggcaatactaccaggagccacactcctgaagaaagctctatatttctattttagtagcccccaactaccagcttagtagggaggtgtggggcttcttgtgcccttcccatccatcctgaaatattgactggcttcatctacaattaccatgagttcataaatataatatctctgtcatgtccagatgacacaattttccagcagctctccccaacttctggctcttaacaatctttctgccccatcttctacaatgtttgctgagcagggaggggcgtgatagccatgttccttccatttgggatgaacccaccacagtttctcgttcttgggacttctgttagttgtgagtctttatagtcaacactatccactgcataaagaaattcttagactgagaaatgtctgtgaactgagagctgtactaatctatggggacagagataaacattgagaaggcagtttgataacatgttgatttagcaaactaatagtagggtcttttctcctaagatgtaagacctttccaggcgtggattcagggccaagttacagtaccaggcacaacttccctattgtgaaaaaggccttgggtttaaacagaaagtctttgttactcataacgtgaatgccattattgcagcaatgggcagagtttgctaggatggctattattatacttttcagagttcacagcagggtcagactgttaatgatttttcttccctagaaatctgcaaagctcctttccaaactgttaagattttccagtagggagtataacaactcttcacatcttatgactgaagtgcgtgatatctgcaacaatagggtcttactatggagttattatgggtggccaagagcaatggcaatagactgtaatgttttggtgggtctgtgcctctaccctttttaacacttgcattccacatttagcactgcttttcttcttttgtataaccaatggcatctgggagaaacatcctcctcctttatacagtagttccatttaaagtctctctctccccatctccctctccctctccnnnnnnnnnnnnnnnnnnnnnnnnnnnnnnnnnnnnnnnnnnnnnnnnnnnnnnnnnnnnnnnnnnnnnnnnnnnnnnnnnnnnnnnnnnnnnnnnnnnnnnnnnnnnnnnnnnnnnnnnnnnnnnnnnnnnnnnnnnnnnnnnnnnnnnnnnnnnnnnnnnnnnnnnnnnnnnnnnnnnnnnnnnnnnnnnnnnnnnnnnnnnnnnnnnnnnnnnnnnnnnnnnnnnnnnnnnnnnnnnnnnnnnnnnnnnnnnnnnnnnnnnnnnnnnnnnnnnnnnnnnnnnnnnnnnnnnnnnnnnnnnnnnnnnnnnnnnnnnnnnnnnnnnnnnnnnnnnnnnnnnnnnnnnnnnnnnnnnnnnnnnnnnnnnnnnnnnnnnnnnnnnnnnnnnnnnnnnnnnnnnnnnnnnnnnnnnnnnnnnnnnnnnnnnnnnnnnnnnnnnnnnnnnnnnnnnnnnnnnnnnnnnnnnnnnnnnnnnnnnnnnnnnnnnnnnnnnnnnnnnnnnnnnnnnnnnnnnnnnnnnnnnnnnnnnnnnnnnnnnnnnnnnnnnnnnnnnnnnnnnnnnnnnnnnnnnnnnnnnnnnnnnnnnnnnnnnnnnnnnnnnnnnnnnnnnnnnnnnnnnnnnnnnnnnnnnnnnnnnnnnnnnnnnnnnnnnnnnnnnnnnnnnnnnnnnnnnnnnnnnnnnnnnnnnnnnnnnnnnnnnnnnnnnnnnnnnnnnnnnnnnnnnnnnnnnnnnnnnnnnnnnnnnnnnnnnnnnnnnnnnnnnnnnnnnnnnnnnnnnnnnnnnnnnnnnnnnnnnnnnnnnnnnnnnnnnnnnnnnnnnnnnnnnnnnnnnnnnnnnnnnnnnnnnnnnnnnnnnnnnnnnnnnnnnnnnnnnnnnnnnnnnnnnnnnnnnnnnnnnnnnnnnnnnnnnnnnnnnnnnnnnnnnnnnnnnnnnnnnnnnnnnnnnnnnnnnnnnnnnnnnnnnnnnnnncttttacagataacttcacatcaattatgtgagtttaaaattcggtgctagcatccacatatgagacagaacatgaagaatttttcttcctgtgtctggggtattttatcatcttattctgtaaactagggtgtcatcatcttgatttaaggcaacattttaacacagtatcagtcttaaatacatggtcttaaaaagcagactgtctgggtttagaccccagttctgccacttagtagcttgttattctggaaacctctttaatcttcatgtaccttcatgtccttattaaaaaaatagaataattaagagtacctaagtactttatgtggagattaagtaaattaatatccacaaaacacttggaatgatgtgtatctcatatgaactgctttgtaagtgtttgttgtcttgcaccacatattatctcaggaattaggtctttcattgagtgtgttgactgaagttaattcacctagtttcaaaaccagaaaggatctatttctctgggctttcccacatggatcctgcatagctctgtgtggctctgtttcagggagattacatggaacctttcctttgtcgatttcatcatcaagttgcagatgcatcatggtgcatgaaagctattattactcattgagtaggtaatgcagagttgtttaggggacaccgagaggtccaggcatagtctttcttccatgctcattggctaagattactgttccaatcctcttattatgttcaaaaggatcttggtcctcccttctctggcttatactaacaacactcatttaaaatccctgcttcgatataagaaagaaaatagctagctttgtatcctttcctttgtctatatgtgtgcacatatacttgtgtgtgtgtgttgtaattgtatgtgcatatgcatgcatatttctctgtgtaaaaatacacacatgctttggtgcttgcatagaaatcaaaggacaaccttggatgatagtcctcaccttctacatttttgagacacagtctttttattttgtaattgtttttctaggacagaagctggaatagctggcttatgctcttcccggtagtctcctgtctctgttccttagacaaagggcatttggcttgcagacagccatgtcacacatttagcttcaactctgttctggaaagtcacactcaggtcttcatacgggcagaagtgtttttacctactgagccataccaccagacgccccaccccctggcctcaatagctttgtttctaaaactcttgaataaaatgaaagactaggtgccacttagaatagttactcttccccaagtgtgaataagaacaaggaggtaccttttccttctgtgggaaggttatattttagagtaaagtttgataaactactatgcatgggtcaaattcttatctataatagatattgtatcccttaagtgtattttagatagataagaatttatttcagtcgtcttcactggggttggaacaaacatcccacagcaacacatataggggaattcaacgagaggcagaatgtcaacgggaggtgacattgtgtgggaatcttttctttggcatctgttgctctactgctacgggtacataacatcgtgtcaagtcatatagcattctgttgcattctgcagaatgttgccttagagatgttaccagtggtggctgattatgctacataatttttcaaaggaaatgtaagtgcttctgttgactttattccgtatcatcctattctttttcttctcaagcatctttctgttcttccccacgcaatgcacttccatcagcactgtattgtacatgagcacagtgcacatagatgtgcatccagactcctttgttttatgaaagagaaagctgccagaagttgtactggcaacagcatccttggtttcctagcatgtaaaatagaggtaaaaatcccagctctgttttccacccaaggggaatcaatgacacggtatacagaagacggaatagtgcatgctgtttcttgtgtctttaacaatattctcagaaaggcctggtttctcctcacacagggctgtgtgtgtctgtggaatagaatgtaaatgtactctgcatgaactaaaattgtcagctgtgctgggtgggttatgagtttttgagcatcggagagctgggtgagagagagacttttaagtctgttttcctcctgtgtgctctctgcttcgttaacatggtagctgctgctttcctggggcactcctgggaggtatgcaagataaaggaaagatggtagccttggaaaggaaagaaggcagtgtttctaccatggcaaaagacagaagagaagcaaatcctgccagtctattttagaagcagttcctttaagtgaatctgtcatgtagccagtaaagttgttaacttcttaaagataaaggaaggaatatttccttttaacaaaaatagactgtatttggtagcgacgaggcgtctcccccggtgatgaagctggagcagttcctgaagggtgagggtaacatatgtgaatccattttgtttgtactgaactgcacaaagaaaatcaacattttgctcagttaggacgttctagcttctaagagatcactgctttgaattgtaatcgcactagataacattttcttgtattcacattgtttccatttgatttggaaaaaccttcctgggaacatttgctcctctttgcataaataaattaccattttaatttagagaaaatgcttcaaaatatggtcataaatttgaatttagagagaccctgacctctgctttttaatctcttggttatttgggggactaagccctgttctttacctatgtctgtacaacaaggttcccaagtctagatcttaaaatgtcaaccaggattgtttggtgttctacttgtgtaaatcaagctgtggttgttaactgaccgtctgagcatgccttgtttggggaatccagcactccatgtacttctgatgtctctccagcagactagtctaggcatactctcaaaaatggtgttcagggtctgtgagcaagcaggaccaattacataaagaggctaggtggcaacacacacacacacacacacacacacacacacacacacacaatttttggtatcacatttgctagcaccccacaggccaagggaaggcagatcacagagtcttaggaaaggagcacaaggctgtgagttgcagcacatacacaaggcagatgggatttgaaagccatgaacacacacatccagtgtaccaaaagccacttcaacttcttctttcctttatcttgcatacctctcaggtgcttcccaggaaagcagcagctaccaagttaaggaagagggtaacatagcagacagcacacagaaggaaaacaggcttaaagcgtctgtctctctctcacgcccagctccctgacactcacaaagcttctgtttttccagttgtcttgttctatggtatgtctaaagacttggtaaaacacaaacgaaacaaaagagtgaaaaccctctcctcctagttacttcacactgcctgttatcgatgcttgttgagggcttagtctgccatgaaataaaaatcttggtttaatggtgggcccactatatgtatcaaatgatatggattctctaattctaacatttttttcttttccattctggctgtacgtgatcctgagctctagtctatgctaagcagttccagcatttaggggcctatatttgagcagcctttggggaggaaatccgtggtttgactcttgttttcacgtataattgtttcacgttcttctatcccaaatcccatgtttgcatttattactgcccactgtatgtgtcctagagaaacctcaaatgagcatgttgcaaagaattctcattgtctgccttttctcggttgctaacaccctggaatgcgagcctgttgagtggctttcataccatttcaatcatgaataatacagttgtgtaaaaatagacaaagtgtaggtctcttagaagcctacaatttgctcggcctaactgatgttaaacaaatgcttgaatatgtaaattaatgtctggcagcagtacctggggtggagaaaatgaagccgtgtatagatggactagtagtggagttgaatggagaacgggtactcagggaaggcttctgaagtgaggagcaagcggtgaggagctggacaaagtgttttcagcagaggaattagcaggtgcaaaggctgctgggacttgcaatgggaagaaaggtaagaaacgtggcgagcagacaaccagggtctagctcatgcagcgcctttttgaacagtaacatctttgcgcttagactctgagttcagtggcaatctgtaggtccttttagatatgatctgatgtctggctgccgtgtgaataggctactgtagggagtcaagctttgaatcctgtgatagttgagttggagaaagatgctgaggggcccttgggcgagttggagtggagtcagcgtgagaggagggcagatcctttaagatgtgtttcatttaaataatctaaatttagagagcatgatcagctctgcaaagctgagcatatggagagtgtttcccacagcagacccagcatacatccggtgacatctgagttaattttaggtagtgtgtcacatgaatggatgtctgtctacattttaacggctacttaggaatttgcggctcattaggaaactcacatgtaaatcttgtggttacagtttttatttttagtaagtatgaagtattaagtctacagtaaaggtagtaaaaattagacacattggctatctggagtggagctgctactgggactgttgataaggctcactttctagggagagcaatgactcaggtggttttataccatgtgaggaccattagaatagactttatcagttatttattgaatcgtaggctccacattagatgatgtcttactgagtctcaatataactctgtgagatgtgagtgggtaaaaccttagcattttgtcattaaagagtctggcctcagaaggagaagatgcatctagccctgcagagacttgatgtgccaagatagggggatatcgggggtggggggctccattcactcagaggagaaggggaaggagtatgtgggaaggagaggaccaggaggggggacagtgatcaggatgcaaggtgaaataaaataaaaataaaataataataataataataaaagtgtcatcatcaccatcatcaccattatcaatcattaggcaagtgactcacagagaagaagaccttgttctaaacaagtctcctctgggttctcagacatggcaagcttgcaagagggatgtgttggtctgatgatgactcttctggaaataaggtcttaatctgttttccagagcaatgtatcttcaggacctgaagtagttcctgcacgtgggcaaacttgttaaagagatgagagaaacagatctccttctctgagggtggggggtggggggtgggatgggttttttgttttttcacagaaggatgctttaagaggcaatgacctagactctcatgggagaggccatatttggggacttccaagtgacttactttccttcttaattatgttttgtgtgtgttcaggtcttggttaaggcttagcttctcttctgtccggatgtgcaactctcaaacctctgacttgcatcctaaattctagttggagagggatgacttcactaccaaccttggagccactctaaggcaagggatccccaagcacatgacttgttcccctttgagcttcagtctctgtcagtgtcaggaagaggctgaagaggaacctgagcccccatgcacagtggaggttgagggaccaggcactcagggaaagtagctatgtgagtagggagacctaagggcacatggaagtggtttacataaatttaaatattttaatagcttagattatttttttttcctaacatgttaggggctggagataaaactcaatgattgaattcaattcacacctagcatgtgcaaagccctggggttgatccctggtacacacacacacacacacacacacacacacacagagagagagagagagagagagagagagagagagagagagagagagagagaaataggacaaagaagacaagggggaagaaaagagaggaggagaaagatgaatgagtgaaagaggagagatagaaagaaaagtaaaggaagttctaagactctagtcaagtccttgcatgaccagccagtagggattcttgatacacatgctctagtatgtcgaacagggaactgcaggggagggactacaggcagatagaatgagacaagctcaagtgaagaagaggttccagaaaagcagcaggagcatcctaaaagagcatgcttctagggtaggtgtgagcctggatgcttctccctggtcttgccttgttgagacaggagctgtggagagcaggggcagagcttcattcagcagttcttaacccatgggtcatgacccctttgacaaatctctatctccaaaatacatctacattatgattcataactgcagcaaaattacagttatgaagtagtgacagaaatattttttacagttggggttcaccacaacttgagggactgctgtaattcaatttcaactaaaaacatatattttgggaaagcgtagaacacaccatcatgtaatttaaatgtgggtaataagtcactgtgctagagcttgctggttgggtaatctttgacaagtctcttagagcgtgaacttggatatcttcctttgttgaatggggataatacatatcagctcattggaagttcataatgagataatatattatggtcctggatctacagtgtgtcaaatgataaatagatgaggagagagagagagagaatgagagagagagagagagagggagagagagagagagagagaatgaatcctggcataactgataccttttgctcttgttatatattaaaatgcatagaaggtgatggctgttagattcaggctcttcctaaacattgaatctactggtattaactggtgaggaatttaagacagcagaaacgctagaatgtgcttatgttatttttcatttgataatgatctagaactttctatcctccagaactttgaacaataacgtttttaaaaatcaattatctactataggctattttgttaactatctcaaatgcactaagacagtgagccaaatggagagtcctgtatttgctttgatagagtaaagtaagtaaattttaattgaaattgaccttggaaacctttgggagaaataagattcaagtcaggtcttgttggcggggggaagattcgaaattgatattggtcctcaggaagaaagtggccccagcatgtgtaacagaagagccttcttctctaagcacagtggcagtggaaaaatgctcaattgggtctgaaaaacatggtagcagcccttggccatgatgatgcaagggcccatggacaagaagattggcaaacttttaaaaacaattttactctgaagtaacttgtatttggaaaaagcacttgtaagaaccacccagtaagtagctttgcagtatttcccactggatctagtacttgttaatgcttttctatattcctttgttattctcttcttatctaactctatttctttctctcccacatatatgactttttttcccctctagagctgtggttgtcaactgtcttaatgctgcgaccctttagtacagttcttcaggttgtggtaaccccacccataaaattaggtcgttgctacttcctaactgtaattttgctacacttatgagtcctaatgtaaacatctggtatgcagatatctgatatctgacccctgtgaaaagagttgttgggtcccaaagtggttgcgacccacaggttgagaacctctcctctacagcatctgagagtgagtcacatatgtaatgctgcttttacatttcctaagctaacagcaagctttcccttgtataacttgaaagcagttataagaaatcagaaactttaatattgttatacaggtattatctgagttgaaaagtttattcacattttgtgaactgttctgtcccaaaggcagaaagaaaacctacctctttcattctttcctcccctccatgtatctctccctccatccctgcttctgcctcaacgcctctcctctatttcattattgacatcatgaaaagggctcaaatagaaacatcagccatgggaacaagatatgccttggagaaggagaggagaaggagacctagggaacaagggcgtcttttcataggacttggcaacactgtactctggggataagagacaaagtcaagctgataacaaggaccaaaaccagaaagacaaggatgctctcatgttcctagtttttcatttaataatggtaatgaaatttctatagtggttttacaggaagaaatacagtgcagttagaggcatcttgtaaccgtggttcaaggtgtagcaacgccatataggttggatcaggttttgctatttattaactgtgaaatttggggaaggtacctgtaatgtagtttctccaagtgtgaactgaggataataaaacagcttgctttgcagggctcttgtgaggatcaaaggaagtataattggcaaactgctatactgcgagcctccttgacatatagtgttataggtgtgtgacaaattaacataagtaaatggctttcctattcttatatactgtatctttatcatcaactttatgaagtattattattattattattgttattattactagttaggtttcagatgtcaagtgggttgcccaaagtcatgtagctgttggcatagaaaacactattcttcaggttttctaccaggcaataaagatgagctcttaactctttaataggctggaggctaagaggcctcagagtcaaaagtcctctacataaaaaataattgaagataggaatgtgtgtgtttgatgagggagaggccatatgtgacactgaataccacaaatggctgcctatgaaatgggaagataaagaagaactagtagactgagtggagtaggaccagccacagagctagggggacaagacaggattgacagaaaggacaggataagagggtctagaggactgtgtaagatttttttggggaaattggagaaagatacagacagaactgagacctacaagtgatgagagggctccttagggaccttagtgagacccttgtcactgttgaaggcagagtcttatttttactggcttgggggagagaatagaaagagagacaagatttcctgaggaggtagtactgctttcaagacacttgggagtaagagtattgagaacttcggaagaagctgggtagaagtgatttcctttgtcatgcagggaaaggccaaggcctaaggacctaaggagtagtgggaaggctgggaagactaggaagactaggttggcaaggataatagctttgagtcttccttggtcatgcggtccaacagacaccctctccccccagattcccaagtattaaaggtattgtgaaaactatcagttaccttccgcaacctgaaagtaagatactgaggttatctattgaagacaccacacacttatagaacacagagaactataactggtactcagctgaatgtccctcctactgaataatagtcatcatggtacttgaaaatactatacacattactggatgagaaaagtggttagtattacctagccacaaacctttggaactataatagtgacttttctgtaagatacatcaatgtaatagtggcataaatgtcatgggaaaccatacacttttttaaaaaattagactttagggttattccgtgaaataaaacccatactagataccattaatgaggccaagagattatataggccatctgtccgaggggagcatagcaatattggactcccaatatatgccacatacccatagatcaatgcagtactcggctctcatcagagacccaccacttggcaacattcagagtgagagactttatagtaccagacctaaatgggatgtcttccttatgtccctcttttctaggatcaaggacttatagggaagagggggaggaaggcttcaaaattcaaattttgaatacaaaacagaatttccccatcacaacagggctgatactctgtgatgaattcacacaaactgtgacagcatgcatatggcctctacaagcacaagccagacaaactcccagcatggagaaggggaagtgagaacaacatgcctcccctaaccaagcagctacttacaatcgatagcctttggggaagggaaaatcagtcttcatcaaggagagtgacattgggtatgtcaactacactccaggtcaggtcccatgctcaagagtagttgggtaacacaaatggacttcatgttattttgtgctttttgtttgtttactttcagactatttatttaaattaaaattaatttttatataatatagtttgctcatgtcccttccccacctccaactcctcttagatcctcccctatacctcccaatccactcaacttaatgtttctcttcctctctctctctctttcaaaacaacagcaaaacaaaaaaaatgaaaaaacaaaatagaaacaaagctcataaaaacacaaaaatgaaaataaaaataaacaagcaaaagacaaaaaaaaaatgccaagacatgatcacacacacacacacacacacacacacacacacacaccccaaaacccaagacaaaaacaaacaaacaaaaccatggcagtcctttgtgttggccaactactcctggcctgaggctgggcctggagtgtggctgatacacccattggcatttggggtcctactcctaaccaagaagctatttgcaattggtatgtactggtagagggaaaattagttttctttggtttttgtttgctttttatacttattaactttacaccctgcttaccgccccctccagtcacccctcccacattccttccactattccctctcccctttttctctgagcaggtgggaaccccctagatatacccactaccttggcacatcaagtctctgctaggataggcacttttcccacggaagctagacaaggcagcccagctagaaaaacatattccacatacaggaaacagcttttgggatagcctttgttctatttgttcaggacccacatgaagaccaggcttcacatctgctacatatgtgcggggaggcctaggtccagcccgtgtatgttctttggttggtgattcagtctctgagagccccaaaggtcctggttagttaactctgttgttcttctgttggtcttcctgtggagttcctatccctttagaggctgcaatccttcccctgtttttccttaagagttcccaagctccatctactgtttggctgtagatatctacatttgtctgagtaggctgttgggtggagcctcttagaggacagccattcgagacttttgtctgcaagcataacagagcccatgcgatgtgattcaagttgggctggctagtggttgcctgttctctcagtctctgctctattccatatccctatatttcttgtagacaggataaatttggggttgaaagttctgtgggtgggttggtgtctctatagcactattggggatcctgcatggctgcaggaggtgacctcttcaggttctatatcctcaatactgtgagtcacagctaagaacacccccattgattcttatgcccctcccttttttagcccaggtttctatctattcctggagacaccccctagctccccactcccatcagtttccattcattcttatgaccatctagccgtccttcctgtctttccccacatctgaacctaaaccctccctttcttctcccacaccctctccaacctagctcctccctccatttgcctcttatgactattttgttccccttctaagtgagattcaagcatcctcactcgggccttccttcttgattagcttctttaggtctgtatattttagcattggtatcctgtattttatggctaatatccactgataagttagtatataccatgcatatccttttgggacttggttacttcactgagggggatattatcaagatccatccaattgcctgcaaaattcatgatgtctttatttttaacggcagaataatattccattatgtagatgtagcatattttctttattcattcttcaactgaaggatatttaggttgttttcagtttctagctatcatgaaaaaagctgctatgaacattgctgagcaagtgtctttgtggaatggtggaatatattttgggtatatgcccaggattgttaagagtaggtcttgaggttgaactcttcccagttttctgagaaatcgccaaattgatttccaaagtggttgtatggctaagagatttggaaggaaagtcaataatacggagaaacctcagaagtcatggagaatttggttggaaatggttataactgtaggctacaaagataagaggaggctgtgcagactagattaatgctccctgaatctttctttcaaaatagtttcagcaacagaaaaagagagaaagcttgtctttgaagtatggtagtgtggttcatggtagtgcattagacgtctaaaacttccaatgtcttttaatttttttaagatatatttatttatataagtacactatagctctcttccaacacaccagaagagggcatcggatcccaatatagatggttgtgagctatcgtgtgatttctgggaattgaactcaggacctctgaaagagcagtcagtgctcttagccactgagccatctctccaaccctaaagagatggtgtggtcttttaaatattttttgacttccaatgtcttaagttttacttttaaaagattaaaaatgccaccatatatctattttactttaatttaaaatgaagtacttagctcttgataaaacagatacctaaaaatgcataccttgtttttccttgttaaaggcagatggtgtggggttggaggtggcattctgtattccatattttaaaggccatgggggaaatgcaaagaacaggataacagggagagggcaacataaggccagggtaggaaggaataggtacagtagaatattgaggctgaagacaaagggacatatccacatgtcagcttgaaatcgagacagttccacgtgacaagacaggaaaaaaagcagcatccgaaagacagctgagtgatggagatggaggctgtctagggtagttttaatttcactgagttgttttctgtttagatcctcaatgccagatttttctcttgagggaaacagaagaaaaattaatatttcaaagggagcatttgtaagatattaagtcaggcattaatttttcagcattgtcttggcataagaggcagagattaatagagccaatttaaaccctcttaggggatacatcaaatgtctgccacttgctatgtagttgccattaggggtagacacaggaagacctatgcaattgaaatgtcatctgtgacactaagggatttttagaaacacattttcaattcattgatagaagtctttatttactttggctgtgaagatgttgtcaacaatgacaaggtgacttgtggaatttgtggctatttcaggagagtgagctatcatttgtgcctatcttgtttccgtgttttaaaggaatgttgctgatatagacttctgttcgtcgtagtgagtggagctgaacaaggaaatggaacatgaacagcagacaggatcattaaaagaggtgttatggtcaaaagtccactgttactcatttgctcttgaaattttgaaatactaactggtgtagattgttcccactagtaaataactttagcagtttccacctctaccttgttttaaaggttgaagagcacagaggtcgtgtttcaaatagagtggggagtaggaggaagagaaatatttgaccatctcaaactgaccaatgtgagttatcatgcattttgttaaaacttgtgtcaagtgacttagtgacgacttgatgtatgcattgatgcagctatgcacagttcgcatataatctcaaaaggggaactctaagcttcattttaaaaatcatcctggatgactgtgtgaaacttagcacaaaaagaacgatacagagagacgaaccagacatgagcagagcagcaactcgaggacgtgaggactagcactccaatgaggtgctccctgagcacagtcattcacacagaagtgggtgggtacagtgcccacacttgaatctggtctttctgttttacttttccatctccttggtgtctgaagccattcagtgcactgagtgtgaactggtatagcatgcttagccttgacttctaccgttagtaggtggggatcattatcaaacagtgttgagatttgagattgtcaggttcagagggcattcacagaaaggctccatccctgagatctgtaagcgatctagaggtaactgctcttgggggaagtgtccattagtgcactgcccactttattaagctgggtatcactcaacctcagaaggatgctgggagtgttgggcctttaaattctgctttgtcaacagcccactcatcctcagtttgctagcctgaatgatgccttgcttcccatggtctgcttttcacaagcaaggagggacttccacctggtcacatttctctaattttacttatttcagccattctctgaagacagcaatatgcgtgtttaaagttatttatggctacattattagttaaacacaaaatttaggctgattgattgctgtaatttcctccctgctgtatccaataacaaaggaagcaactatcccttaactttgaaaacacttggttcatcttcaaaaatagaaaatttcatagtttcctggagatataattgttctagaagcatattcttctagaagtatagtacaccaattcattgataatcattactttataaaaatatatatcatggattgcaatatgcctgcaagtggcataaggaggaagaggggggaaggatgaaaaatgggttacaatttcattcacgaaaatgcttttgtcaatagactatgaatgacagctgtcagtaagtgcattctgaaattctcttaagttgttgcatgtctacatgtgtgtgtgtgcacacgtgcatgcactagtaagcgtgttacttgtctgtgttgggggctatggaggcggaggttgatgtatgatatttttctactcttttgcactttaatttttcagacaatatctcactaaactcacaatgcaattcatcaattggtaagggtgacctgccatcaggctcctgggatccacctgtgtctacctctcccatagtacttggggtacaaatgttgttgagtgctatagatccgaacaatggtcttcacgcttgtctagcaagtacttagttttattttttactctacttttatttttttagttctattctttttttttattagatattttctttatttacatttcaaatgttatccccatttatgtatgagaatacactcgctgtctacagacacaccagaagagggcatcagatcccattacagatggttgtgagccaccatgtggttgctgggaattaaactcaggacttctgcaagagcattcagtgctcttaaccattgagccatctcgctaccccgctattattattattattattattattattattttaaataaagctcaagtcctttccatgattgaggatgaagagagagaccttctaggatgtgttggaattgacagtaaattggagcttagccaggtcagggaagggtggtcatttattgtgctacttcatggccatagtggcaggcagggcatctttcagatgcttctagaaagactccacagagtgtgagggtgtgacaacatcctggcctgacagagttctactgggcttggatgactttgctttcacaatcatcttgactatttactaagactgggactatctcatcattatttgagatgtcctgattcatgctctgtgggggtgccgcttgggaatctgtgttatagagatgctccacgagccactgtgattgacagttgggtttgagaaatgctggagtaaacagtgatccacagtaggacagcttggaagcattgtgtatctctgttgtggtgtgccatgtagcttttgtgggatgaagtctgtctcctggaatttaaccagggagcagcgtggaagatatattagtcaggtgctgaggatatggccataggctttcccagaaaccccctcctttctggtgtgagcttctgaaaagcgccatctggttctgattaaatcctgtattcagaggccagggagggcatgacttcaggaaggtcacctacaatgtttctctataaattttgcttactatttgtttttgcttttctcttttgggaattcatcctccagacctctatggagtatttataaggcttcctgagggttctctagtctccttaggtatgcctagtctttagtctcattttgtatgcctttatttgggatgctaacctaccactttagcagattaacccttgcagaagcacacagaaaatgtaatcatgtgatttttttttttttttttttggtgttctatgccaaggcactactatacttggaaagagtgaaggtttatttacctcttgggtatatcttgcataacattgtctaatgagggagaaaatttcataggaaaaaaaaaagctgcctggcaatggatggcaattcttcatggagctctctgggttcagtgtcagtgaggtctcatttcaaaggaggacctggctacagtttggtgtgaatagattgtacttacaacccaattttcaggtctgtcttggttttatcttttgtgctgtcattcattcatatagtttaggttcattcatgtccaatagagccatgatttggaaagtgaagtatgagagaaagtaggggtgggaaggagacttcttgaagactacaataacacttattttattatatgatttaaccaaattgaggcctatcctaataactgtagatcaatacatgaagcccacatcttcacccttccttttccttcccagactctgcagtatcatcagggagtttgtatggacatgccagcctgagtatttatgaagtcattcatggccacactctatgtctaggacatgtgttctggctgtggagtgggcttgtcacagacagaaaagacatacacattgttggatcccatgcatttgaagcatagaattccaaaatgtcttagggatttactgctgagaacagacaccattaccaagtcaagtcttataaaggacagcacttaattggggctggcttacaggttcagaggttcagtccattatcatcaaggtgagcatggcagcatccaggcaggtatggtgcaggagaagctgagagttctacatcttcatctgaaggctgttagtggaagactagcttccaggtagctaggactagggtataaaagcccacacccacagtgacacacctactccaacaagaccacacttccaaatagtggcacttccttggccaagcatacacaaaccatcatacaaaatcatgagtgcctgggaatcacctaggacaaaatttgtcactgcagatatgtcattctatatagtaaatagactgctgaccccatgtagaggcatggcttgagcaaagaggagagactggaaatcaccatctcccagttagagtttcttggatctatagtgcttctgtttcctatattcatactgtccagagatcctgcttctagtacaatctcaagcatcctaaactcactatgacattttaagtcatttagataagagtacttcacccattgatagtggttgaccatgtgtttgaggtctgtaggcttactttcaactggtcttctagaaatcatttattcaatgtctaggcatcttgtccataagggtaactttaggttattatctcattgcatagactgaaaatgaagcaaataatgaggcttaatgtgtaaaaatctgccaaaggagaggcatctctctttagtatatttttcactgatagaaatttgatgaagtttttctttgcctgttaatatgctccacaagatgtgtgggtatgaagacaggaacactgtttgatcaatcattcccactgtggcttcaattgtctaaagatcaaccaaatggaaaaacattcctgtctgtgattacagaattaaatctttcaatgtctcagatatgtctacacctaattatagcacttcttaaatacttatcaagacgggtgctttttcttttcttatagtttcttagcattgaactagctcaaaggcaacatggtgtttcccagtttggagcactttcgtgaagtgtaataaggcatattacacacagacaggacactataccatcctagaggtatcgtttccagagcgtattcctggatcatgtgggtcctccctcaatacatggctcctcagaagtctggtctcctcctatacatctcatcacgtgaaaagaatgctatttctacgtttctctgcccatttctttggatattcatgttatctagagaaggagaagccattggtgacataatgtaccaaatactacacagccagtggttttccagtgagcatgccatgatgtttaaaccctttgtcagtttatgtcattgggatttttattcattggacttcatcagtgtgacaatacgtaggaaagttaagtcaaaagaggacagatttactttggctcatggtttcagtttatggttactttgatcagtgtttccaagcatgtggtggggctgaaagcaagcattttacctcatgacagcagtgggcagaagctcaggacaagatgttccaagaacatgctccctagggacttttacctcgctccatctcaactctgaaattcaccaccagttctcaataatgttatcggattatgaatccaccatagacttaacttgttcactatgtcagagtcctcatgatctgatcgcttctcaaagattggatccatcagctggggacatggttatcaaaagccagtgcacccccttttggggggaggaagggatttagtatttcaaccatagctgcttgtatgaagagctatgattttctcgttcaagtaggtagtttagtacgtgactgcccacgattagtagagtaaatagaatcctgcagatgctcacattattgatcatttgtagccaataaaacttgcatcaacccaaactccttgggggtgattaattatctacaagtaaaatactctgtgctttcaaacttcacagaaagtctgcctttatttcattgcagcaaggggctcaattgagcagaactaccatctagatattctggtttgcagtggccacagaataaggaagggtgcatttatattgcagaataaatatcagaggggtccaggtgtgtgtttctactcatgatttttatgtaaatctcatggccacatcacttcttccactactggaaactccccttcttaataatttcttcctaccgactgtagccttccacaagagcctgaagccagactcgatgcagtccagatatattttaactctcttttatcaaagctaaagagaacatttcttggaaactgtgctgagttctgcatcttgaaagaacaccaactgtggaaattttaatgcgtaatgaagcccagggagtaatgggcttcattccaaaacgctgcgagtagttacagtttaagcaggcaaacatgacacacattcttaactattttccaaaatgaaactgctttagaagagaggttatttgaaaagaaaagaaatgtccagtagtgaccagacagtcctacaactcttccccaagaggcttgatgcacagccaatgtacagttaaatagtttagcagaataaacaagtgggttgtcctgagaggttctaagcagggaattctttttcatggatactcacagcatttgtaaccactgctgaatcacacagttcattcccatttgatgtgttatttttctaataaaatgagggttgtagttatctaagatatggttacttaacctcttattgaaattaattcttgatgcatgttcaaagcttaagagctttcacaggtcacattttattcctctttccgtcttttgttttatgatgtaggatcttcaagcaccaaatgactctttataatatagctgctggccaggcatgatggcacatgcgtttcattctagtacttgggaggcagaagcaggcaaatctctgtgtatttgaggccaatctggtctatataacacattctagatcagcaaaggttactcaatgagaccctaccataaagaaaggaagtctttattactctatctgcccctgctcttactctaacagtgttatacttcctcttgatctaatttttctacgataaaaacaccattgtctaaactgttgttatctatggtctagtaaaccagaagagaaaataattgttgtactttgtaagtctttacagagaacttaaggctaacattttattgtactaatattttgattttttccattatgaaatataaacaaaacacccgtagttattgttggcttgcaaaagatgcatgtaaacaattatttttgtgttgcattgttattagacctctttttttaatcacataaaaattctcttttttttatcacataaaaattttctgcttgaatttgtacaagtagtacttaaaagcctatattcaggggatgagatacaaaagtatgaatgtgaaacgtccccacagacctttgtgttgaacagttggtcccaaggtggcgttatatttggagattatgggtctaggtacctgggagatgtagggatgtatgggtgattctagtgcattctggatgaagtctctacttccagatctacgagaatgtgggaggtcacattgaaagctcctgccacaaccaacggagtctcaggcagcttgttttcattgtcgtgaacacatggtcccaaggaaagcttccttcaagttgcttccattttatattttgtccatgcaataagaaaagtaagtaattcagaaaattgatactctagtgtggggttgttgttatagtaaacctgatcatgagttttaggtgtgtaaacctggttggctggaagaatatggaagagtttgaagcatactagatgtgagaatgatgtggtcatggggacttgaacttctttctagttttacgtagtcaatccagacctcactgggcttgttacagatatgttactttcctgctgattatctatcacagcacagctttgtgacagctgatgcacaggattaaataataacattcagacactaatcaaaggctgccacttgttgtgaaacccataaatccgaaggaagactaccgagcattgtacatgttaatcatgagaagcagctttgtggttccccacacaaagggggagggagtgaaactggataagacaatttccaaagcagaggcatgattacaatctctgcccccaaactgtagtgtctcttctctttaaatgcttttttctgattagcaccctgactctgttgggtgtttggttttctccattcttctctctcctcccatctctctcagctttttgtctttcccatgtccatctttcttcatgtctgtgttcattgtagttttctaactttatatctaccaagagaaagattgactcattttttagatgacaagtgtatctaagtgtaaattcatatttaaaaaagccaaatatctaagtgtaaattcatatttaaaaaagccaaagtttcagttagtttcagccttgttaggaccatagaaagtgactgatcatgtagcagggtgcttctcatttgagtctgagatgatagatcaagatagatccagtaatgacatatcctgcccagtgccatgaccagccttcgtatttttgacttcctgtccaattttctttgccctcagaatagcttccaaataactgtagataaaaataataagctgccatgagttctaggaagagcaggggagaaaaataaaatgttgcaaatgtcctgataagccattttctcagaagatcagcatacacatttctagtaaagaatctatataagaagttcagaaaagttattgtaggaaacattcgttgtacatatgtggagaggatagaagcccataaattaacctacatagaagaggagggtttatggattttacagtaggaaatagaattttgaaaaaagaataatagaagtaatctttcccctcgtctttacttattttgaaatttatagaaacatgcataacaagcctattttatttgattaattaagattaatatgctgtcatttacttaggctaatatacacttaaaactccaggggaagccagttgtaattttattctcgaagatctctttttatcattatttacagctaacaagacatttatgttctcctcttggttcggcgtggtgaggcatttttggcaacattttcctaacttgaaatcctcatgtgtgtggaaatctagttagggaaatgactatgtaaataaccactcctgagagtataatctctcctttgtgacataaattagatatctattcacatctgtggaataattctcagctttgcaattaaatcctctgatgtgcccgagcaaacatgccagtctcttcctagtctaggagaatttagcatttagtcaactttctgcttgaagagacaagctatatgtggtttagaacagatgcttcaatttctcccgatttggctgtaacaggactgagcttcagggagatggatcattaaacagcaaaggtaagagacacctcaccatgcacggttagagtgttactgcaaaaaaaagaaaatgtgactttgaatcttaagggtagtttgagagtgtccatgtctaataaagtgatagttcttcccttctccttttcatctaaaggttattggttattggttattggttattggaaatcgcctctcttacagagtaaagacaatgttttattcatgaaatttggctctttcttgtggattttggggatacgtatagttaaagtaaaacataacaaggttactttaaatccactttttttaatgttgatttttctcacctttagctatcatgctttgtttttctcagatctgtttaaaatctggaatacttccaagagtgattattaaaatgttcacaaatctttttctttcatgatgtatctgttgcctctggaattatatggatacatgacttttctctttaaccaaatttatagtagttattacatatgctttttaatgtgatagaaatttagtgtgtaaatgtttctttcataccaaaatttaaactccccaatgacaaggtcagtctcctttacctaggcttttcttttggttgttgggataattgaggagtcagggaatgtagagaaaatatgtactgctctccaaggatgagaaaatatgtatctgcctgttgctggctagtggattggctgaccacacacatccacggatgcagagaaaaggctctgcagttggttcttggagtatggatgcagtgtaatcaaggatccaaggatctgtgcttagcctcttctttttttttttttttctggtttggttgaaaatattactcagtgtgattgattgcattgaagatgagagggcacttagttaattaagaagaagagaattctgggcttttgaacaagcagtatttttttttccttaggtatgtataaaagcccaggaactgagtattcatcattacatcacatccatattttgaggttatttcttcttctttctcaattaatgcttgttaaccttttaaagagaaggaataagaaacacaactatgatttttactgttgaactttataatgcaaatgattatttaaactctcttttggctttaatggatactcttcccaaactctgtttggttacctttctaggctttggatattgtttagaggaattcctggtaattgtaaactgtgttttaccataatgccagttccatcttgctttggtgcaacattaatttcatcaagcaaaacatcatgtatgtttcttggtcagtaatattaggggaaggatactcaaactagacatcaaatgctagcatataaagacccagtattcggagtaaattacctctttttgagttattggataccaggttcccagagactcccaaacatttctcttgattatcctccacaacacttctctctctttctctctctctctctctctctctctctctctctctctctctctctctctctctctccnnnnnnnnnnnnnnnnnnnnattttcaacctcagatacagacagaaaaaagaggggttgctagttggttggtttttagaactaaatggacccaaggagagcttccaggtggctgaatctactaactccagcacaataggacagaactgagtcccacccctgtttggctggtgtgcttctacaagcctgcctatctccctttgtggatgatgtaggccctctgcaggtggttgaaggcctcccctccccctcccccctctctctccttctctctctctctctctctctctctctctctctctctctcacacacacacacacacacacacacggtatttcctaactatgaactctttttttctatatattatttatatgtatgttttcagggcagatcacttggcactagacaaccaattggtgtgctcctccctgggaaagagcacctctcctctcccagctatccttcgttgtctattgcagcatcacggcctagtgggcttcctcccatctggtttggcatgtccattcatgtcatcattgttcagctctcatttgagagatcatgttagaaagactttaccggtgtagcttctgaagttactagaaggcataatttcacagcaaataagacaccacatccttgagtcaaatagagaagtcaggtggggcccggaagctttatctctattggttgacattcatagtggtggaagttactggaggatgaaaggaatcttccatcttcatcagctgctaaccttatgagatacagtgatgaccgtcttggcaagacatatgcactagtgcaacagtgacagaacactatgagagtgactcctctctgattgggtgtaaggcctgttccatgagatggaattcatgccttctactgtcaatgaggccaagaacttcattggccttagagaaaaacctacagtagtttaataaatggacataccaataaaatgactcacaatgaattattgctatacacagaaatccgtgtgtctctccgccctcatcagagaagcttctcatagtacatgagaattaacataagaagtcaaaattgcttcacatgcagagaataagagactgtggaatgcttagttttaaatagaatgtctttatcacatccttcgtgacaagctcagggatcttcaagaaagagagaacgtaagagctacagttggtagataactgcaaggaaacagtcctctggacacagtagggtcgttgcataaataaactaatgatcattgtgacagcatccacaagacttgtgaaaggtcaagctagacagaaatcctaccatgagggaggcaggaaagcatgaagtaccatccatgggcaaggagctattggtatttaataactactgggagaacaagagttaatttaagagtgtgaccccttgttgaccatactccaggttcaggccccactctcagaagttttggggcaatacaaattggatagacagagatagagagagggagagaagggagatgaagttgggtgggtagggaggtggatatggaacaagttggggaagggaagtgagtaagatcaaaaggtattgtatgacattctcaaagaattaataaaactattattttaaaagatgcttatattggtaatgctgcagaacgttacagaactaagagtgcatttgatcccgtcctcccttctggctctgtagagagtccagtggtgggttcagtagaattagagatgaaaaataacttttcttttggcatctgaaacttaactctattaattttggaagttttgctcttttaggagtatcatggtttcaacatcattaacaccagatgattttagtcaaattaacctttcattcctcctggggattgataatgtaagtggtctagcatgacttgctaaagttctctagttattgagggacatgggaagtccatatctatacattacagtaagatcaaaagtctgcacatgaagacagatattatgcatatggccatcttttcatagctcaattgtaccaggtcagtgaattttatatttacattgtaattttgtagtatagaaaataaaatcaacataaagagacattagataaaattggagtcaagttcttttaccttttttttttttttttttttttttttttttttgctgggtgtgatatcggttgtcgatgcagttttcaggcctcaacctgtgttctcatttaatcacaccacaaattgactgaattttaaatttatccttttaaatggcttgctcaaacttctcattcttcccttccttgccataaaaatgaaatgaccctcattatcttgttacgagactcacttgatgcaaaatagtccagggatggactaattacataattacatgtcataattaaattggatcaaagcttatataaaattttggtaaaaaaactttaaaataattagaaaaatagtaaaatgcaattaatattaataccgttatagcagtcttgatcacaatgtaaaaattatttcgatacacacaaaagtaacgttgtgtcaagttttcaagcttaatacaataatctcctggtatatggagcaattggagtccacttcaatagaattttattattttatttttattttccccctttattgaaacatttattcttttctcatacagtatatcctgtatggttgcagttccccaccctctactgccccaagttcctccccagcatcccttccatcttgatccacttctcattgggggggaaaaaaaaacaaaaaaccatggacttctaagagataactcaacacaacaaaatgaactgattaaagagaaggcaaagagcatcacatcggagtcgagcaatgcaaaccaacagaagagaagccccaagagaaggcggtggcaccagggactccagggtcaccgattcaggagtcccatgaaaatactaaactaaaagctctacgtagagaacctggtttagcctcctctcagccttatgcttgctgctccagtctctgagttcatacgagttttgctcagttgatttagagggccttgttttcctggtgtcctccatctgactcttagagtctttccatgccctcttctgtgggatttcctgagctctaatgggagggatttgatggagacatcccatttagatctgtgtgttccaaggtttctcattgagtaataactggccaagggtctctgtatttgtttttatctgctgcgggaaaaggcttctctgacgatgagaatattctgctgtacatagatgaataaagttctggtctatgtatagcagagtatcattaggaattattttattgttgttgttttttttttttaagccagaagtatttggttttaccccaggtctctgggttacctagcctctggttcttggccaccaaagcagtatcaggtatggcttttatctcattgagtaggtcttaactcaaatcatagattggttggttattcccacctttgtgccacattgccctagcatattttgtaggcaggacatcattgtagatcacaggttttgtggctgggttatcgtttatgtttcttttttggtggactgcacagaaccttcccagaccaaagacagaagaaaagagtgatggctttatggaggtactagcttgacaactccatgtttcatgagttgtactgggtactttcttcaacaatggggccttgctgtccatttgcatagagcaatctattagcttggaagctcttagcattgtttggggacttccatgggactcttttggttaataactcagttgtaatccaattgtatgcctaacgctgtatgggtactggaacctttgttcatctattataattggtgttaataatggcttctcacttttcagttccacttacaaggaacctgcatttttttttttttggcatgccaataaagcccctttactgtcacatgggatctttgatcttgaatgatctgtttttaaatctgagacattgcacaaactttcctaggattctttccagatttaaaaaaacaaaaacaaaaacaaactggatccagagggatttgacatgcatggtttctgcattaaaaactttcaagaaactttcatgaggcaggggtaggggtggggaaggcatgcgataaccagacatgtaagttggatttaaatgtgttttccgctaacttccttgctaataattatacaggcagttttatgtaagcactttggaaattttagaagcttttccatttcaggcttaatatagttggatcataaataaatatcagatatgttttggagacactagaaactaaatattatgcaaaggctaccttctgttgcgtcaggggctcggattgtttttgttaaaatatctggtatgaaagccctgagattagatggggtgtcagctccctgtatttttctgctatcgaatgtcgatgacttctattgttggcaggaactgagatttcatttcccttggccacattctgatgctggctcacagaagcaggtctccctttgcagatttttctgctcaaggtaagcgagagaagacatgcaggagggaagtgtgtttgtggctggaggatgggaggaacccagtgagcatcctcagaatgaaagtgtatttttttttctctgaatatataaaaaacctgctcacacagcctaagcgcctctgactggtataatggcaaagatgtgtgtaagtgtatgtgtgtgtgtgtgtgtgtgtgtgtgtgtgtgtgtgtgtgcgcgcgtgcgcacgcgttgtcaaaataggactgaagggtttttattttctctgtagagtaaaatgaatgtttttgtggatcaggtgcctatgtgtctgccttaaatttatgaactaataattctgctcccagagataccgtcagatattttaacactatggtttgttctgtgttattctggtaagtgtatgacttcgctttaaaataattgttcttggaatttctgagtatgaagaaaagtcagatataattaacatgcacagtgccttcttcatcaaatgtaagttcctgaaactggctaataatttcattttctccttacaaaataccttttgctattttctcctcactgaagcgagtataaacaccagcagaatagaatcaagcaggttttatgaatgaaatcacaaacaaatgatagtaaataatatcatgatggataccagctaaaataactgagttgacatagagtgtaataaattaaaaatctatatccccaaaggatcgtgcttagtattataggtacctctcagggatatagcagagtcctgtagttcttctgaaacccttaggcactgttatttaactacacgctgttgactaaggaaactggatcctgtagcctggagacctctgtgttctcagctcaccctgctaatgccctctggtcttaagtaacacagggtggcaaatatttagagtgagctctatgtatctttgggatttttttccttctccaccatcggcaaatagcacagttcctaccccagtctgtaacctttgaggtaacttccgttgttaaacacacaatgggctgtgtgggtgtttaatggtcttcccaccccccactaccaccccctatttcaggtagctattctcactctcgcccagtatagagttagtatttctcaatgatctcatgtgtgcagtttagaaagcacagcagcaggagcaaagaaattaacaactacaaacgtaactagcctataagcgtgagttaaatagaaacatgcctttaccattgatacatatgaatgtcactggctgtaagcgccaggtaaaaatatacaaataaaatacaggttttaaatatgatttttttgattgttgacattatccatgtgttatttttagatcctcagagactccatatagatctttgggggtgaaacattgtattggaaaagaatgagagcctgccatttgccctgtttcatacaaacttgtattcttaatatccagtgtgccttaagagatagagaaagcactaaaaggcgtttgagtatcctgtgttaaattacatcagggctgtctgtccccacagctcacagatctgggtcagtatttccccattttctttcgtatgtgtcactcccagagaacttgggaggtcctcaggagagtgtagtcacagccactttcttccttcttccttcctgtgtcaaagggcaggcagttttcctgtgtcctctgagtcagagtttagggaagagagaaggactgggtggaagttgctgaagtgagggagcgtcaccggcccgtcatctcacagcagcagaaggtttgcagaaacccaactgtttgaattttgttattaactgttaacatgagagttgaactgctggttgcttagttgctgtgtattttttctgttgtcatttctaagattgccacgactactactaatagtctgcctattattgactacaaccatgcaagtgaatgataatttaaattagtatctcagccaacctacattttcttgattgatggtacgacttgatactcatttttctcttttaacaaacttagtctgaatgtctttccttcctgttaaatattccccaccaacacaagctttagaatagaatgttcttatggttagaggacactcatttatccaatcaaatttaaactatgtaaaaaattattgtgtgcccctggccggtgaatcggatcatttccattagacactcttctagaagcagagcctgacttatgtattccttgctttctatataattgttctccagacattttctctccttcatttatttttccatgagacatgtggatggacgtatattttcccataactcaaggagttaaaaactctgtcaacttgacccagaagaaatagtgtcttacttatttgtgtttcttaaattgttagtgagactgggcagtttttgcctcctgagacttgcctattaatattctttgtctattttactcttgggaggcttattttcgagttaattctacggacatttaaagatgacacaagtaaaaatctgtttgtggattggctccaatgtaaacagtttcatctttactttcggcatttttcctttaaacaatttttacctgtgaaatctatttacatggagttaaatatttttttgttttttttgtttaagaaggaaaccactttattaatttttattccatgtatgtatgtttatacgatagaagggcacgcgaatgctgcaacacatgtggggaggtcacaggacagtgtcatggcgtggcctctccttggacatttgtgtggattcaggggaccagctcaagtcaccagactgcaagggccattgcaggctaagccactcgctgcccctccgcctttgaaaacgaattgcatgaagactaagcattgttttgtttcattttttgaggtagagtatgatgtaggctggccacagcttgctactttctttcctttgcccctgtctgccactgaaggagtgtgccaccatgctgagtgctaagctgtatgtgtagtatgtataggctcatgtatgttgggtgtggaattgtgtgatagacccccgtgccttcaccattgtgcacatttggaacttggtaggagttgttgagtgtccttccatttcctcctggttagcccagggtgactcccttttgatgtttctgcttttcccaagattatatacaccttttctacattttctcccactacttttttttttttttttttttttttttttttgcttattttacatttaaatattaacccatctggaatgttttttcctggtgtttaacagtgtaacagtttaactgcacgtgtctttgagatggttttttatttatcctgacaataattctctaagaaatttatctttgcttttcaagttttaccttgaaaaaccaatataaagtggcattgacttctctatctctggttggctggaactaatgcttcctttaaatgtttgatggtttgaatcactcttatctcttttgataatctcttggcagacagttttgttagtccaggtaatgttacattcttccaccagccttatctgatcctaatccatttataacagtgtggattggctaattgttctaactcagaaactgggtcatatgactcctctgtttgttgtattacttcctgctatttaattattattttaaaattatgtttataaattatatatgtatatataattatatttatgtaatgtataaaatgtgtgtacctctgtgtgtgactgtgaatatgtatatgtatgtgtggccacaaagactagaagaaaggatcagatctgttgaaagtagagcgtttggtggttataagctgaggacatgggtgctggaactgaactccaatccttcgcaggaatagcaggtgctcttaaccaccacatggcctcttctatcccactttcagctactttttaaaagccaaagatgaatattttggctatggcataatcttatatctaaaatgcaatagtatctcagcttcaggatgtttatagagaagctctactctgttttattattttttttattcccctcttagatgcttagatcttgaaagagctatgacccatgggctacccaaaggcagcagtctgctctaagagcttatgtggagcagtgcttctgtgggtgactctgcctcctgtctgttcttacctcactagtactctccaacaaccttcctgctttctgcccaacatgcacgtcttacactttcctaaggaggtcttcaggttccataccatagtgcttttgtgcgggctattccttctgcagaattgccatcccccaaatacctcacccatcgggagacttactgtatgtccatcaaacaataatctaagaccttcttctctgaaaccttgtccggtccccgccctctcctttattttaacaacttagcccatgttttgctttactgcactttaccttctgtcctgatgctggactaggatatctcttgtaaatttccagtgataggtgtggcatagaggacccatctcctgagttactagggccctgattcatgtcaaactaggagctggttactaagagttgttgttgatcagaagcagcagaatttttttcttccttttattgaaaatagatttatttccatacaatatattatgactacagtttccccttctgcaaataccttccaggtcctcccaaattctccacccacccagatctataccctttctttctcagtctcattagaataaaaacagacatataaaaacagtaaaaataagataaaattaaaacaaatgtgatagaataggatgaagcaaaaaaaaaaaaagctaccaggagaaaagagagcccccaccaaagcacaagaaatacacaaaggcacagagaaacacacatttgcacacacagaaatcacacaaaaaacataacactggaaatcataatacatatgcaaaaatctataagagaaaagtaataaaaattaataaaaataacgtcagacaaagcatggtgagacaaggaacattcaaaaatattattgggtttattttattttggccatctattgctatgtatagtgtctgtctttaagggtggtttgtatacctagtgagactccattggaaagaaattaatttttttccttcatgagtgttatcaattggagatagtttctgggttaggaacgggtgcttgtgtccacctctgctctcagcactaggaccccgtctggcttagacccatgcagggagtgtcagtcctgacatgctatcagtctatgagctcacatgtgtgttagttgtgctgtttggaagtccttatttcctctgtgtccccatcccctctgactcttacagtcttcttccacagagtcccctaagctcttagagagagagagattagaaggagatagcccagtttggactgtcactgttactatctgcatgttgcccagttgtgggtctctgtttgcttctgtttactgcaggatgaagcttctctgcgtgagcatggcacatatatctactagtagagcggaatgccattaggagtaattttagacattttattgctatattccttttgcagaatgataagatttggtcttcccgtaggtcctggcctatctcgtgttaggttctcacccacccgagcagtgtgagatgtgggctctatttcatggagagggccttagatccagtcagatattgattgtttactcctacaagctttgtgacactattgtgtcagcatgtcttgcaggcaggtcactattgacgatggaagggtttatagttggggtgatggctatctttctccttcagcagtgtacagagtacatctagtaccatgaacactagtcagtaggggtgaaagctataggtaggcatcagcttgacttcttcatgttcgatgagttatgtagatggtgtagaagcagtggagctttaaatttcttaagttaaaatataattacatattttctcctgtgttttctttctccaattcttcctacattcccctctcttgtcctctctcccaagattgtgacccctttttcttttctttagtatgtgtgtgtatacacacatatgtttgtatatttatacatatatgtatgaatacacatatacatatataatattcacatacatctatatgttacaatgagttttgatcatatttgccctcccttccccaacttttcctggatccactatgccctttcccttcccacccattttgtgtcctcctcactcccagcaagatcaatatgtaccaccgaaatattcttgagtgtgtgaatgtcactggagccttgatatcagcctttgctttccccatatctaaccgtttctgatagttctttgggtaggggtgaaagttgtgtaccattcctttctccatgcttggatttgtgttgcaaggtcttatgtatgcagccacagctgctgtgagtttatatgtacagctgtgtctagaagacaatgttcccttgtccttatcctccatctctggctcttcccctcattctctgttctctgctacaacctttgaggatggagtatgatatatatggtcccttaataatcttcagtctgttgtgttctgccttttggttagttgtgggtctctgtgttgaccatcatttacgacaaacagaagcttctcggatgaaggctgagaggctccttaatcttggagaatactgataagtcattaggagttgctttaatattattttactttcacagaacaatactaagaggttctcttcaagtgcctaagcaactttttatagtttaacatctctctctctctctctctctctctctctctctctctctcccattattgcttttagttttcagtttgtaagtattcgaagactttaccatccaagaaacaacccagccaataacactctggcttgaatttaccaatcacacatcatagttttcactttttcttcaaaccagcaaacctctcttgatccaccttcacccattgtttatatcttcttgtcatgtattgtagtctagagtactttattacctggtttcttcttccagtcaccaaattattaaaaggccacatgttattgttctccagaaaaacacaattaatagtgtgtgtgcgtgtgtggccaaatttctgtcttttccccccaccaatttcaagttctactttaaatgtttcccttaatggctcaactatatttttgtccatgcagacttaaaattttagaatgatctatggttgtcaattcttccttcatagcaatacatttcaacagtttttattttattttattttttgcctcagctggtatattagctacattgttgttattgttgttgctgctgttgttatcagacagtatacctggcatattcagaaagagaaggtttattctgcctcactgttcagatgtcattcaccatgtcagggaaggcaaggtggccagcgctggtcacatcatatcaatcagtggaaggttctactcaggtttgtttctcctgtgattggaccacagcctgcggaaggaatcatggagtccatgctcagtgagatcttcctattttcagttatccaaaccttcatacactgtgcattttcgaattcccacactttgccttgctcctgccagcaatctctcaccaaccactatcattctgaatcttttagttcctacctgctcttcaagtaaactgcaaataaacttctttgataaccttgcccattttactagtcaagaatggttgcttacttttctgcagccaagtagtataatttttaactttccctattcacttaaatcatgctggctttggggatggttacatgtgaattcatattatatgttgttctgataatccgaagtgatgttttaaaataaacacacatggaaaggtgtggatattgaatgtataatcatccttatcaaaccagtaacaaatgatgagtatatgcattttgaatgtacacacacaatcactatctcttatttatcccactaattctttgctataactagtttttcactaattatgttttggctgttgcccagagactctaagataagaaagctcatactagagactgtctcacctggggttccatcccatatacagttagtaaacccagacactagtgtggatgccaccaagtgcttgctgacaggagcttgatatagctgtctcctgagaggctccaatgcctgacaaatacagagatgaatgctctcagccaaccattggactgagcacagggtccccaatggaggagctagagaagagacccaaggaactgaaggggttagcagccccataggaggaacaacaatatgaactatctagaacccccagaactcccggggactaaactatcaaccaaagaatacacatggaaggacccatgtctccagcctcatgtgtagcataggatggccttgttggacatcaatgggaggagaggcccttggtcctgtgaaggctcaatgtcccagtgtaggagaatgccaggaccaggaagcaggagtgggtgggttgggagtggggatgaggggtgggggtgggtgaacagaggaagggggtagggtttttttttcagaggagaaaccaggaaaggacataacatttgaaatgtaaataaagaaaatatctaataataataaaaaagaaagctcatcatagttagagatacaatgatcaacataattgtagcataaaaactaagggacaaagtgtccctcatggttgaagttgaaaggaaatactagctagatcacactagagtgtaaaggccaagtcatggggtttggattgtttttaaagagcagtgcttcaagtagcaattttttttaagagaagtgaaaggagataagcacaatctaccctcctaggaagtcttgttttccctctctttctttcctcttcctcctcctcctccttctctctctccttccttccttcctttcttccttccttccttccttccttccttccttccttcttttttccttccttcttccttcctttcttcctttcttttcttttttttcttccttttaatttatttacatttcaagtgttatccccttaccctgttcccccctccccgaaatcccctatcccatccccctccccctgcttctatgagggtattcctcttctacccatccacccactctcacctcccgcccttggttccagtacacaggggcatctatctagctttcataggaccaaggacctctcctcccattgatgtctgacaatgcccatgcagagaaagtccaagaccaataacactgatgaaagtagatgcagaaattcttcataagatactatcagctcatcagaaagatcattcacaaggatgcaaggagtgctccacttatgcaaattagtaactagtatgtcacaacagtagagtgatgagtaaaagccatccacttctctccgtagatgcaaggaaagccttctataaagtccatcacctctttgtgataaaagccttaatcaagtcaggtctagagcagtgtacctcagtttaataaagacgatgcacatcaaactctcaatcaacatcaccctaaaaggagaagcagacagcatcacttctgagaccagcaacaagagaaggatatttactctccctcttccttcccaatgtaaccctggaagttttatctagatcagttagggaagagagacaaatgaaaggcatacaaatatggggagaggaagtaaatttattcctgttttgtacatgatatataacaattccatcagaagactactgaaactattaaaaacttcaatagagttgccaatttaaaaaaaatcactatttgaaaactggcagtaatttaacatactgttaacaaggcttctgaggaagaaatcaagaaaccaatcccactcccaagagctatacaaattaccttggaatgaatctaaccaggagtgcataagacttctatagtaaaagtacaatatgctgttgaaaacaggttgaagatagcatgtaaaaattaaaacaatcttcttggttcatcgatgggcagaattaatattgttaaaatggctattctaatcatatcagtttatagattaaatgcaatttcaaataaaataccaatgacgttctttatagaactagaggaaaaaaaataagatttatctggaatcagtctgaagagccaaagccacattgaataaagaaaagcaaggctgggtataagaaaatatttaattttttcttttctttttctttgttcttctattgtatgatacactctgactgaagccttcccaccctccactcctaccaggtccttccaagcctctcttccttccacttctcccagtccccctcctcagatttactgctcctctgcttcccttcagaaaggagcaggcctcccagtggtgtcacctgaacatgacataacaagatgcaacaagactaggcacagaccctcatatcaaagctgaacagggcaacccagtaggaggaaaaagctcccaagatcaggctaaagagtcagagacacccctgttccctctgttaggagtcccacaaaaaccctaagctgaacaatcacagcatgtatgcagaggacctagtacacacccatgcaggctccgtgattgatgcgtgcagatgcaaagatcacacccaaagactaggcagagctcagggactgccccccccccactcccaccacaactgaataagaggagaaagggtcataggaaccaaaggagtagaggataacaggagagcatggcccatagagtcaataaacctcacaactcacaggggctcacagacaatacttgatcttaacacgtaacagtattaaccagaacaggatgggactgatggagaaacatgggtggaccaaaggaacacaacaataaacacagaagcaaacccatgtacctataggcagttgattatgaaagaagtcgcaaaatcggtcactggaggaaagatagcctcttctgccaatggtattggtaaaactaccaattggtagaactaggtacccgtgcagagaataaaacaaggcttccatttcttagcttgagtaaaatcaacttgaaaattggccaaagacctagatataacaacaggaactgtgaagccagtagaagaaaacaagaaaaaattacttttaagacactggtagagatggtgtgtgtgtgtgtgtgtgtgtgtgtgtgtgtgtgtgtgtgtgtgtgtagaaagatataaaatacacttagaacaaccatacatagagtggattacatcaaaataaaagtatcttcatagaaaacaaaacaacatagtggaaaaacaacctattgggaagcaatttcccaacttttcttctgacaaatgactaagaagggactcaaaaaaatctaacaacagcaacaatatatcaaacaatccaattaaaaggtgacttgggatccaaataagtgtcttcccaaaagagaatagacaaatgagtaataaatgcatttaaaaaacacttgtatacaatcagccattagggaaattctagagtccgacgatgtgttattttatctttgttagagtgactaccgctatcacaacctcaaagaagcttgggatgaggaggtggagaaaaacaaaagctctcattgtgttggtagagcaaagaaaaaaaatcaactcttttggcaaacagtgtgtgtcccttaaagcactaaaaatagatctaccttatgttctgcttgtcccactcctgaatacatatccaaaggaaaggaagtacccataccagagggattcctgtacacatctttattataccaggattctcaataaccaaggtacagaactagcctagaactcctcagcagatgaatggagaaagaaactgtgcgcgcgtgcacgtgcacacgctctctctctctctctctctctctctcacacacacacacacacacacacaaacacacacacacacaaacacacacacacacacagagacagacagacagacagacagagacagagacatggagagatggagacacagagagatggagagacagagagttggagagacaaagaaggtaatattattcatctctaaagaaaaataaaatcctaacctttgcaacacaatgaaatggcaatgaaggcattaagttaagctaaataagtcaggcacagagagataagtactactgaatttccacagagcatcacaaactctagcaattactagaggttggaaaggggcgaggaaagggtttaatcagtgcacataatagtagtgtgatgaggtattccattgaaatctgtttgtagagttagtaaatgctaatttaaaaggtaaggggatttagagccacacttcatttttgaagaatgtaagaaaagcaatactggtgtgaagagactgtggaatatcccaggatttattgaaagccactccattttcagttagtgccagccatcttctaaatgactgatttcaaacataaaaagcaaactggttcatggatttcagtcttaagacaaagtcagtctttctatggaaaaaactagttgcatgcctcttgaatataaagttgcatgaccaggctggtctggaaacaaaagcttttgtttaatttgttaatgtgggagatggtgatgcagaaaggtaggctttaagactttcttatggaagtagtaattgctgaagttctacaatgaatatcaagatcagaaaagagcttccattttcaaattcttggcgaaacttagtagctacaggaaaagaattaatctaaatgtaaagtcgaggttattaaaaatattcaagggctgcagaacaaactgcagtgatgaaggctattggtgggttagggaacaagagtctgagtcagtgcttatgataggagcatgtgcaagccatgtacttttatggaaaccataagctggcttcttagattttcctgtggtctgaagtcagatatgaagcagtaaggatgtatttattgtacagcatttgtgctaagtgcctgcttctaaacatgtatgagtgatggctgccacctctaagtaggcagtgggcaatcagatgccaattcttaggagtttggagtggaggggttttttggatttccctttgaaggctgagctggcaaagataaattctggtgtttatttttatccacattgaaacatatcacaagctacttttggttatcgtttttcatttttcaatacaagtgctgttatccaagtgtaggattctgtgtaggagagagcacagggaggtaaatgaaagctggtgggctcctaaaacctttattgaagattaatattgacttgtgatacaatctgactcttaactttgtgtctgggatattaatgaatgattctgtattgtctaacactacatgcaatctgagaacaaaacgtacagccatatttcttgatcctggtaaattggtattatttgagatcaatgaatgacttgtcattcttaagaaatccatacattaacatttgtctggagtaatttctagaagcccagagagctttaatactcaaattatcaatattcaactgtattgatagattcagatgtattctaatactaaacacacacacacatgcacacacacacacacacacacacacacatgcacacacacacacacacacatgcacacacatgcgcacatgcacgcgcatgcacacacacacacacacacacacacacacacacacacacacagaaagagtcagagagatacaggaagacagagagagagagagagagagagagagagagagagagagagagagacagagacagagacagagacagagagagagacagagagacaggcaatttaaacaacagccccttcagagttttaccatctattctaaactatcgtttgtgtaacaattatttctgctgtgctccattcctctaccagccttagtatgcttcttagctttattgtcctgatgactacaggataaccctttacactctgtaaaatcaaagatctatatattcttaatatctagaatactaaatattatgctgagaaaaggcactccatttgttgtaaataattgtatactttattcaactagaaatgaaatgagagaggggtgcttccaatttgaagcagtactgtgggctttagtttctcaagaaaatcttggaagcaacgtgaatcacaggtctcagacaaagacattcagtacacagttacctgcttagataaatccttagcttgtcataaaacttctaaatataaaataaatatagaaacttttacttagaataaaagcaacagtaaaacagtgacatttatcaaatagcttaaaagagtctccagaaatttaaacatttatgaagcaggtattttaggaaatgagaagaatttcttaacataattttttttgattctttctgaatttcacatgtgcacctcaatcccattcgtctcccagtccttccatacacttccctacacccttgtagccttccctccaagagaaaatcaaaaataaaaattaaaaacatcataaaacacctagccgtggaagttgtagtctgtcactgtgtgtcacacagtctgtcacagtgtgtcaccttttttgcccaaacagctttacttacattggtctggttccaggtctctggcttctgctacattatcagtgctgcactttcagggctcaatcatttctacatttcattatgaaaagacttttaaggtaaacgtttatgttcttttcattgccaaagaaacttagcatggagtgattttgcagtcagagttgaaaaacagtcgtccttcaaacgacatctgagcaggatgggcttaggtttcaagttcaaatcttcagtcatacagatggaggaactgtgttggcatttcttagaaaacaataactgcgaaagtgttgatatagcctatctgcagacatcccccacactttttcctcctactgtattagcatatgtgtctttccttttcatgttctatgtcaaaattcagtgctttggggaaagcgtaccctggtcctacttgtaacccattatttttctacaggtggttattcttcatctaactgccttaatctattttttgttgttcttttactgttaccatttccctcccagtagcaacgtcccttcatctgacagacagacccatcttcaccagctagggatgaagggataacactttttttcttttatcttgacgacgttcagtattaaggatcattgccggtgcattgagagctggaggcaggatggagacacggttggaattgaagagatataagaatgtgttttgattcttccattaatgactataatgatgcctgagtatacttcatgatgcatctattcaatagaattatactactactgttccagattatcataaagattcagtgaggaatgtaagacatctaatgagtatcttgtgcatgctaaatgctcaacagatgcggcatgcgccaatggtgattatatgtcgataatctgattattattaagctgaatacttcactaagtggatatcttgacttttttttttccgtttccttgaaattttctgcctgcagagggtatggattactgacatttttgtgcaagtaaaacaaaattgtgcttcatctaattgacggttaggttgatttagattatcttttcctgtatccatttgcattcgccatgtatttttcctttgtctttaaaaattagggtgtgttgcataactcatgctatccactgtgcctttgaagacacacaaaattgaggcaagagagagacatcttagttccctgacttctctgtttggtttctgattgtttagacttccaattcttaccacgtatggaagtctgtgaaaatagcttttcattttaaaagtatcttgtagtgcaaactttcactgtaatttacaaattaatatatcatattttctctaaaccaaagaactcgttttaccctttagcctcatcttatccttttgtctaacaattccatttatcatataaacgtgaccttcaaaagtcacctctcaaatgaagactactgatcatgcctttatactatgagcccttatatccagagagcagctcatcatcttttggtttttcaagagtgggtcgaaggacccttgagatttacactgagacaatagccataaactgacactgtcttgtgcagactgaatgtatttttgcctgggttatagcccctgggaatctcacttgttaataacaaggacccgagcccaagtctctttgattacaaattctgcttttttttttctcataattttaggccaattattttcttctttgctattaattcattttctacagttgttgggtaagtatatattagtatatattagaggttattggacaatatttttgtgccagtgttatttaccaaggttataatattattattctctttctttaaatagtaatcatttaaacaaagcaaacatactcatttatacttaccaattcattcaacatccctagtcctatttattctttagtataaatctaattttctatatagtatcaccccccctttttttttctgagtaagtctacagcaactacttggctcttgtttatcagaatgtttgtttagttctttcttgatttttgaagggtattattgttgggcagagagctattagttaataggttttgtgtttctttttcctttcagtaatttaatgatgtcactttagtttattgtttctgacaacccgtggcaatccttgttctcctggacatagcacagctcttcactggatatgcctcatattttatctactattgtcttctgcctctgcttactgtgtccctatgcctgggtctcttcatatttactccaagaagtttactaaacttcttggatctttttggttatttgtagaaatcagtaggcattattcctttatatattcagtctagcttgtatttattctgttttcctgttaggaatttagttatacttagattgaaatgatttgacattatcctatctattcccttcctttaaaatttgtatatatgtatttctgtcataatacgttccccctatgtatcctcggatgtttttgaatgtcctaagactacaaacatgagggcattactacatcacaactacattacctaattttaagtctttgttcatttaaattttctttcctctatgtttcctagactgaagaaaaatttctgtggatcagttttggattctgcctatttttcccttaccatctccaaccagtgatctcattctgctaaaattgttatttcatttgtctttgaattttctttttgtccctttttctctgcttagactaaccttatacttcggttaaatcgagcatatctttctttactattttaaagactatctatctatctatctatctatctatctatctatctatctatattgttaatatacctatatgttagctactttaagatatttgttagatgaattggagcttcgtttttgttttgtgctttgtttccttatcaatatgccatattctcctgttgtcagtgatatttaaatgaatacagtttggatagttggatataaagcctctggattctgtaatattcttctaaagagtgttgagtgtttatcttagcatattgttcagtgcttaacttgaatatacttaaacttcattttttgctttggtaatgtaaaaatctttagaaaatctaaggtgttcccaagcctgttcaacttggccatattcaacagtgtcaacaaaggttggatgggtcctggtattacctttggggcatgtcttgtacatgtagatatcatccaagttcccgtgactcttatggatggcagagatggtaatgatgtgtttattaatgagacttcctgttcttatgtgcttggagtcctgaagcattctacttccagttctacctgatctccactgtccagttcatattgttttggctatcttgggtctaatgttttttttgtttttcatataaagttgagaattgctctgtcaaggtctggaaaaattgtgttggaattttaatggggattgcattacatctgtagattggtttgggtaagatgaccctttttactatcttaatgcaacctacccatgagcatgggagatctttccatcttctgatgtcttcttcaatttctctcttcagggacttgaagttctagtcatacaggcctttcacttgattggttagagtcacactaagatattttatatcatttgtggctattgtgaagggtatttccctaatttctttctcagcccattcatcatttgcataaaggagggctactgatttatttgagtcaattttatatccagtcacgttgctgaagttgtttatcagctgcaggagttctttggtagaatttttggtgttgcttgtatatactatcatatcatccttgaatagaaataccttgtattcttcttttccattttgtatccttttggcctctttttgttttcttattgatctagctagaacttcaagtactatattgagtagatagggagaaagtaggcagccttgtcttgtccatgattttagagttattgctttgattttctcctcatttactttgatgttgactattggcttgctgtatattgtttttattatgtttaggtatgtaccttgaattcctaatccatctaagtcttttaacctgaaggagtattggagtttttcagcctctaatgagatgatcatgtgatttttttctttgagtttatttatagagtagatcatattgatggattttgatatattgaaccatccttacatccctggaatgaagcctacttgatcttgatgaataatatttttgatgtgttcttggattcactttacaaaaatttattgaatatttttgcattgatgttcctaagcaaaattgttttgaagttctctttgttgggtttgtgtgtggtttaggtatcagggtaactgtgtcctcataaaatttattagagactgttttttctctctctattttgtgaaatggtttgaagagtattggtactaactctttgaaactctggtagaattctgcactgaaaccatctggccctggacttttttggttgagggtttttaaatggctgcttctatttccttaggggtaatgggactgattaaatagtttatctggtattgaattaactttgacacgtcatatctctctagaaaatcatccaatttgtttagattttccaggtttgttaagtataggtttttaaagtaagacctgatgatttttattttttaatttcctcaatttctgtcattacatgtcctttttttaatttctgattttgttaatttggatactgtctctatgctttttatttactttggccaagggtttctctatcttgttgatttttgcaaagttcttggttttgttgattctctgtattgttctctttgtttctaatcagttgatttcagcttttagtttggctattttctgccatctatttgctcttgggtgtgtttgcttctttttgttctagagttttcaggtgttctgttaagttgctagtatgtgatctccccaatttctttatgatgtcacttgaatgaattttcctctcaacattgctttcactgtgtcccataagtttgggcatgctgtaactttatttttttctgaattctagaaagtctttaatttctttatttcttccaagttattgttgagtagagagttgttcagtttccatgagtatgtgggctttctgttgtttctgttgttgttgaagtccagccttagtccatggtgatctgaaagaatgcaaggggttattttaatcttcttgtatctatcaaggcttaggtttggtcttttcattatgtcccaaatttcctggatgttttaggttaggaacttctttgatttggcattttatttgaccaatgtactaatttttctatgatatcttctacacctgagattctctcttccatctctggtattctgttattgatgcttgcatctgtaattcctgttctttttcctaggttttctatcttcaaggatgcctccatttatgatttctttattttctatatttttaaatcttggaccattttgctcatttccttcatctgtttgactgtgttttcctgtatttctttaagtgaattatttatatcatctttaaagacctctatcatcttcatgagatgtgatttaaggtcagaatcttgcttttcaggtgtgttaggatatttgcggcttgctgtggtcggggagctggattctgattgtgtcatattgcattggcttctattgattatgtaattgcacttgccttctgccatctggatgtctcttgtgttggctggcctgtgtggcccagattgggacaggattcccaggaagcagatggagctgtgtgtccttgatggaagcaggcctcttgggaggcagatagagctgtatctctggttagagcagagcccttgtgaccctggttagagcaggccttgtgtccctgattagagcagtcttgggaggcaggcagggctggggttggggtgctgattagcaggagtataggtggtggtgtggactaacatgaggtggggctccaatagggctatgatcagaacagttttattagcctatagttggacaaaattgtcaagcatagagcttattgtataataaaggctaagtagatgatgtactttattggatacaggtattaaaaaattaaaaaaaaaaacaaacaaaaccaaaacccaccaacccaaaaggctggcaacatcgctgacagcccctcgtgatcctgtggctacctgggagctgtgtctcattgcagctgcccagagttgtaaaatagaatcatatcgcatatcccttgtccagaaagatgtctgacttctaaatatggagtcttttcctattgcctatatattggtcttatatcatcataaagtcaaaacgttatagacaaataattctaagttgagggccatctgcctgtcaaatattccttgttcagaaaggttggaaagaaaatgaattatataagctattaattgtaaagaaaattttcactcttaattttatatttttgagtctatgtgtattaaaatataaataatttccttactttttgtgggaaaagcatttaattgtttgagaatactgtaattcatctcattgatccatttttatattatattgttttctttccttgttgctatgaccaaatatctaatagaagcagcttaaagaaggaagggttcactttggtttacggttttaagggatagaatccattctggctaaggagacatgctggcaggagctgagtatctatagctaggaagtatagagtaagcaggaagtagaacccagttacaaaatctcaaagcctattcttagtgatatatctatctctcctagccagactctatatcccaaaggctctaggacgagctgttctcaacctgtggttcgagacatccttggggttgaacaacccttttcaaagaggccacctaagaccatcagaaaacacagaaatttacattatgtttcattacattagcaaaattacagttatgaagcagcaatgaaactaattttatggttgtggatcaccacagcctgaagaactgtattaatgggttataggattatcaaggttgaaaaccatttctctagaactttccaaaacagctccactagttgtaaatgaatttttaaaatacttgagcctatataaacattttatcaaaccacaatgaccatacaattttgtaaacatttttgttattttaaataatggtccatgaaccactttagctaccatttggcacgagtcattctaaattcataatagtgtaattgatgcttcaaaaggtatgaatgttgtttaaaacgttgccagatttcccactatagtgcctgtagtcatctgacaaatgagctggagagatactgatatttcttttgtctccagtgtctactttcttcatggtagggctaaaaaatagctttgaaaaccaacattcttgggactagagtggtagcttagttattaagtgtacttgccgctcttttagatactcaggttgagtttttagcaccatgtgtaactttagctccagagatctgaggtcctcttcttgcctccacgagtacacacacacaagcagcataatcaaatagtcatttgaaatttattcaaaatcattaatctcccttttattaacaacactcattaacaaatatacaaccataatttatagaaattggagctgtcattattattattactcatcattattattgatgctatggttcagtggccaggtattgtagctgatgattattcccattgtgaatgtgccgttttatttctgtctcagtgatgctccaaggacttatcttccttttgtgcactgacaatatgagtaaagcctatgctggcctgctcctcaatctgaccttgattatgtctttcatatgcatcatctggcttcattcattcttcatgggctcatgtcctttgagctttcctgttacttttccctacctcattcactattctgaatttgagaggctaagggtgtctgctgcaaactgtgggtagtcactgaacagtctgcatcatttcttttctatagacactgatggctggagcgttcctacttcctggaacataaagttgtcattaggtaacataagggcctctttgatttttcacgttcttgtcttatttccatgtgagaaagtgaattgtggatttttagtaagaagtatttttttttaaaaaatactaacttgggtcctccccccacctaggatcaaatttaaaccttacgtgtttaaacataacaaagaaaattttgtttgtttatcattccctatatctgttggtgttttgatctcagagctctctatgctaagatgtattgtaatgcgcctttggagtcaatcctgaaaagaactcatgttcataaaataagacatggtcagaaaaataagtatcatgtggtttttatacatttaaatttgtaacagagaaagaggagagagagagagagagagagagagagagagagagagagcacatgtatgtagaaaagggactctgatggggaaggagatgtctaaatagagggtgaggaggggaataagagagttactgagtgcatgtgacataaacaggagaggctttcagtaacagaatgcttatcaagatgggataagggggatagaaggctgtagagacacaaataagaacaaaatatgatgatatagatacatgaaaatgtcaccacaaagcttattataaactatgctgatcaacattaataaataaatgaattaataaaaagaaattttttggtaacggctttctaaggaaaatttattctccatggtccaagctccaaatatttctccttgcccctgcatattaagattcctgttcccaaccacctttgttcacctctgccaaatatgcttattgaaccaatgaacaaagttattacatatggttgtgactgaatgccttgaaggggcctccgtaatgctgttcacttttcttcctttagagaatgtattaactcacactattggcatttattaaagtctagacagtactgtattaggggaactaaacattgaaaataatgatctgggagagcgccatttttctctctagtgactgtcaaagctgggtctggccaggagcacatagggccaggaatggcagagcagctgggacaaggtccttcctgtctccatctgcacccagaagttggggctgtactgcagtcctctgtgtcaggggagagcaggtcttccaggagtgctgacacaggtttacaggtctgtagaaggggcaagctccagccaaagacagcaagaccaactaacattagagataaccagatggtgaaaggcaagcacaagaaacctatcaacaaaaagcaaggctctgtggcatgatcagaatccagttctcccacaacagaaagtgctggatatcccaacatacaggaaaagcaagatttggatttaaaagggcactgttaaggcaaaacagcaatgaacagattggcaaaagatctttaccaatcctaaattcaatagagggctaatgcccaatatatacaaagaaatcaagaagttgaactccagaaaaccaaataaccctattaaaaatggggtacagagctaaacaaagaattctcaactgaggaatactgagtgactgagaagcacctaaaaatgttcaacatccttaatcatcagggaaatgcaaatcaaaacaaccctgagattccacctcacaccagtcagaatagctaagatcaaaaattcagatgacagcagatgctggcgaggatgtggagaaagaggaacactccttcattgctggtgggattgcaagcttgtacaaccactctggaaatcagtctggtggttcctcagaaaattggacatagtattacctgaggacctagctataatactcctgggcatatacccagaagatgctccaacatgtgacacatgctccactatgttcatagcagccttatttataatagccagaagttggaaaaaaccccgatacacctcaatagaggaatggataaagaaaatgtggtacatttacacaatgaagtactactcagaaattataaacaatgaagttatgaaatttttaagcaatggatggaactagaaaatatcctgagtgaagtagcccagtcacaaaagaacacgcatggtattcacccactgatagatggatattacctcagaagctggcaatacccaagatacaatttacagtccacatgtagctcaagaagaaggaagaccagtgtggatacttaggtccttctcagaagaggtattaaaatatccataggaggggatacagagaggaggtgtggagtggagactgaggcagggtagaggcatttagagactgccccacctggggatccatcccatgtgcaattaccaaacccagacactattgtggatgccaacaagtgcttgctgacaggagtctgatgtggctgtctcctgagggcctctgccagcgcctgaaaagtgtagaggttgatgctcatagccagctggtggactgagcatggaatcccctatggaggagctagaaaaaggacccaaggagctgaggaggtttacagcctcatgggaggaacagcaatatggaccaaccagtacccccagacctaccagggaataaaccattaaccaatgagtatacatggagggatccatggctccagccatgtatgtagcagaggatgactttgtccatcatcaatgagaggagaggcccttgatcctgtgaatctatgcccagtgtaggggaatgccagtatagggaagtgggagtaggtgggttagtgagcagggggagggggtaaggagaggggtgtgtgggggggaaacgttatctgaggaaagcagataacgtttgaaatgtaaataaaaatatccaataaaaaagaaaataatgatctgctttttagtgtcaagaattgcaacagttaagtgtgcagaattcatatgagtcagacagatgaggaatggagcgtcttgagtgagttatactaaagctctgctgtttcatatgtggaataattatgatttcttagatcacacttacttcaaatagctgaacttaagtaaaaatagatctgtgaggagccttttccttggagctgttgcttttccttggagctcagacaggttgatcccctggacagatatgctatcttgtggtctttccaattgttgctaaccagtctgtaagatcctgctgcccaatactgttgttattctgtgactgctttatgtgctgatagtaaagctgagcctgggcatttgttttatatcccttgaataaaaattactggccatattggatatctgtagacaggattacacagtgtgtgattagtcaggactacaaagactacaacaaagcaagcctacagctcagtgccctcatggacacatatcacgtggttcattgtggctgggggaggatgaagcacagtgtgctctatgttgttcctcatattctcaagctatttctgtctggtgcttaaccatcttcttttaggggcatggagccttgtattgtgctctgcatctggccagcaagctatacaagaaagactgctcatgaattagtgttgagatttgaggaatgtagtcccgatatgtgcaccccacttccactataattcatcatagaaattttatgttctgaagaaagaatgatatatattcctcaaactcagacaaaatagaactgagtttgtctattataatacaaacatatctgaagcttgatctcccggttgagtccatcactgtgggtctgacaacaaaggatacgaattttatgtccttttaatggcattttagccataggagtatttgaagtgtgtgtgtgtgtgtgtgtgtgtgtgtgtgtgtgtgcacgatagaaacattggcatactccatgcatagacaggtgtatctttgggtggggatattgattgagttatgaatatgacactggataactgcccgctaaatttgatgtagtaacattaaaactagattttcaagcaagatatcatatctttttgtgcattccttattagtagtacttataatacaaaagttcagcaagtatttaggattagcttgctttgcctagaccgttggatgacagtttagtgtgcaccattaaaagcagttccagattttgatcttctctctccccaaaagctacttttcacggatattttatttctatatgccctctggaggtatgcaggaagaactttcataatgggaatgggttatagttgtccataacctgctccactattatcataggtggatttttagtggcttcatagttggataggaagcatgtattaattatgtgatcaaaattagtgaagattggagccagggagattgctcagtggctaaagcatttgctgtgccaagaagaaaaatagagtttagatctcaagcacccgagtgaacgtcaagtgggcacatcagttcacatgaacgtctggccttaaaatgcagagacagtggattcgtgtaacaaactgctagggagactcgctacatcagtgaactctgggtttggttgagggtttctggctcagtgagtaagatgtgaatgatgaatgaagatttacaatatcaacctttggcttccacatatatattctgaaatttgctcatgtatcttcccttacataaactctacacatgtaaaatatatacacaccatgcacaccatattcatacacataaaaagaagaaaaattagttaacatggaatatacaagtaacttgttggcagtatggtatacaagataacttagagatatgaagaccaaggataggagatgttcagtgttcagtgtatagaatttggattggattgctttgattagtcctagtatagatcataagaaatttgagagaggactgtcagcatagtggtgagagacacacagccccttcaaagcaatttccaaggcagacagtgcatctatcaataagcttgatagaacaatattatataagattaactcattgtaagacagaacacagttctattttgtctgagactgtgtaaatcaagataatggatcaaaatgataatttcaataaaaccactaaaaccctagatgtattctttgagttaagagatccttatgacttgttaggagtatttcagtcttctgaaatgataaattaacgtaatttgttgctttgaaatctaatgcagggcagtttcaattaaattaaaacccaatggcacttgtatcaaaatgaagttattcagtcttttgcccacacacaatattcttttaaacagactgttctcaaatctgtagcattgcaagtttataaggtgggattattccttttgtctcttgtagaatgtggttttctataggtataagaaacaatgagatttaactgtgtccttttactgtgtactactgtgtgtctgatcctgtgtttttttccctggttcctagttcttttaccctcttttcgtttcatgcaattgatccttttgtcagaatatgaaagggtctggaagcttattacacgtgagtacctttgggagaaacacaaaacacagagcaatatggatgcaaaagatgcttcacctccccgaaaggtcgatgaaatgaaaatggaatggatgccccagcttttcttgcctgcggcttcgatgaagtattattacatattgctctctaaaattcttgatggtgtttgaaagagtggtgtgatagactagggctaaagcaatcagggagatcatcacacagaaagtatgtcccagtgtcaaatgaagctcatgctagcagagacattgtgtgagctcagctgatgagccagaggaagagactgcacatatcaggtaacttggttaagtgaagtatacaggtataccatagtgaaactctgggacgtgagataattatgtcatgcttaaaagtaaagccagactaaactggttttaaagtcttggagcatgacttagttgtcatgtactatctgtggtggtttaaatgagcatggccttcatgggctcatatatttgaatacttagtcccgagttgccaaaactgtttgggaagaattaaaaggtgtgatagaaggcaaaatattattggaagcaggatgtcactgagaatggattttgaattttcaaaagacatactttttccattgtttgctctctctctctctctctctctctctctctctctctctctctctctgcctccccacctccctcccttcctccgtccctccctgcctgcctccctccctccctcttgtttgtggatcaagatgtgcactctgagtttgttcccaatgccttgcctttgttctgccaccatggcttctaatggtctaagacagtaagcccaattaaatgatgttttttaaaagttgctttagttgtaatgttttgtcacagtggtagaaaagtaactaagaagctgataccaatagtaaggtgctattgctgtgttaagaacatggccatgctgatatttggagaaatgtggaggtctttgggacactaaactctgaaaaaagagcttaacaggacatctaagtagaatctttgaagaaaatagtgctgagacctttatggacggactgtgaaggccaaattcaagaggtttcagaggaagcaaggttggcaactgagctagggtatcattcatgttatattttggcaaagaatgtagttgtattctgcccttattctaataatttatctgagtttcatttgcaaggtaatggactaatttctttggtagtgatttcaagacagagtaatattgactctaccacgctattggtcatcactgttatgcaggctgaaagaagagcaaatggggcaaaaggaaatacagaatgtgaattttaaagagaaaaggagcaccaggaaatttaatattagaatcaagtctgaaagagataaggatatcaaggtgagaacttattcaatttgggatacacacacacacacacacacacacacacacacacacacacacacacacacacatattatcagataatagataagcagataatcctgcaatgtgtaaaaggaaagacctaaggaattttatgcttctaacaaaaacaacaataaaccaaagctgttgcaattatgatccaaggggctatgctttaccccaagttggtaactgatcttgacagtatcatccacagagttctggttcacagtcataaaggatccatgagtaaggggggtggatgaggtcaggtgtgtgcatagaggtcccaaggccatttagtgaagctgtggatatgaaggctggattatggtggtgatggcaagattttaggtatgccagagctctgggatatctgccaaggagagctgcacacgggaaagggaacttgcccaaggagagaaatgtatttcagggagcaaagctggaggaatgaaaccatcttgcatcagacctggattcagtccttgccctgatggttttcaggcttgctgtggtgtggtctagtattaagaattaggaggtgtggccttgttggatgaggtgtgtcactgggggtgggcttcaaggtttcaaaagattctcatcgttcccagtgtgctctctgtgtcttcatcttgctcgtggatcaaaatttcatctcttagcagttccttctgccatgtctttgctccactatcatggactctaaccctctgaaaccataaagccaactaaatgcttttaaaaataagttgccttgatcatgatactttagcagatcaatagaaaagaaatcaagataatcttttagcctattttattcatctgcaaaaaaaaaaaacattatttactaaaacaaacattcctagagaacttgttgtaagggttatattaaataatgctatacgctttgaaaagttaataaacacatgctcgctgttatttcaatgtggattacatgcattttttttaacacaacaaaacaaaatacaataagacaaagcaaaatccctcacacggaggctggacaaggcaacccaacagggggagaagagcaggcaaacaagtcagagatacacctgctcccacagttagggtctcacaaaagtgccaacctaacagtcataacttgtatgcagaggacctggtgcagacccatgcagactccttcaggctgatgtttgccactgcagtctctgtgagcctatttgtgttgtgcttatttgattcagtgtgtggtgttctcctggtcttctccatcccctcagactcttacaatccttctgacccctctcctgtgggattcccaagctcttggggcagggacctgatggacacctccaatttagcctctttctccatgtaatgtctggctgtgagtctctgcatctgctcttatctgtgggatccacacttttaagcagccaagagcttggatatgctctaacacaaacactgatctagtgtgtgcttgaagacccgagactgactggggtcgttagcacaatgacatgctactttactttgcttagaactggaacagtattctgggataggcatttgtgactaatacccatggaaacattgaaaatatgcaggcatgaaataaccaggatggtttgagatgaaacttctgtttccttgggaataatgtaaattactccaacgccttaggatgtgatccgtgaataccaaagaaagacaaaaacaaggctcaataaagtggtgtataggtgtactgttcaagtctttgaggacttcccaacactggaaggtatacttcttgttttgtcagctcttcacaaacctaggtgtgtctaggaagagggaatcttaactatagtaatgtgtttataaaactggccaatgagcaagtctgaggtatattttttgttatctttcatttcatattttattgatgattgatgtgggagggtccagcccactggttttagagacaatcctggagagctggtcctggatggtacaaagaagcaggctgagtagacataagaaagcaaattaataacattaataagtgtaaaagatcgtcctcctagcctcatgcttccaggaataatacttggactcaaaatatatttacaaatacctcagccatacaactattctcttctctgactagataatgactataaaaacccatttattttaacctaattgtgcctcatgactggttacctgtgctcagataccatgcatctgtcttgtcacattttcctgtgagaatcttctacctgtctctatcccaaaattctctcttctctcgaatgttccaccttctatttcctgcctaagccatggggaaaatatttcttatgggcaggtgccacatcaatacagacataagatattctatgtacaaataagagctagtccataaactctgttttgttttagtttctgcctccaggtactgccatgaattccttcagtgacagagcactgagtgttataaggtggaaatatttcttcctatctattttcccctattgtcccagtgtcttggctgatttactggtgacgtggaaacagtggtgagtgaggtcacttgcctagagatatgttgaggacatatatagttgagttgttgttgtttttttgagaatgcatatagacctggccattcataaaaaagatctaaaggacacagaaataacaaaagcaaaccagcagcaacttcactgtgataaaaagactgatgctctaagaatttcactgtttcattaagttagtgagtgcctgttattaacccattttaaaacatgaactgctatggggaatcttcagagaggcaataaatatggatggtgccacagctatctaactaccacctttggttgtatcaatggcaaagaagaaaatatagattagattttttttttgtagtatggcttgggggaaaaactatgtaagtaagagcatgctgtggaaactatatatcttgttttaaagctaatttacttcatggaaacctgagttttaatttcccaatttagagccaatctttaagtatcacttttttctctttcagagtttaattgtctgaattggacttaaatattcagatatacagacaaacttgaaattccttgattgtgatataaatgaataactttattgaatttcttttacataatgatcattttatgagttacagtgccttccttgactctagaaaatcatttcaatagtggcaaagttagatgaggcttgtatattactttctcttgtgacatgtctgggtttcttctgattatttaatataaacttggtagtaacaagcataaacttactttagtctgtaagtaacttacttttctactaaaactagttgtttaattcagctgtgtgtgtgtgtgtgtgtgtgtgtgtgtgtgtgtgtgtgtgtgactattttcaggtagagccccatagtggatgaaaagtgaacccttttgaaagttgtcttcatttttcatgaaccataaaggttataccattaaacatcttattacagcttagcatcatgacttggaatagttgggattttcaaagatctttggctccccctgtacctagtgatttgttacaagctcatttcttgtcccttttggtccatcagcctgagttcaaatgtcaattctcctattcgttagctgcaaaattgatttgtgctaagttacttaggtttctgagctcagtcttcttgcatgtgaaatgggtatgatcttatccacctcatatgattgtactaaagcagtaagaccaacattttctttatggcaggtccctcatgggcattgtgaaataagtgtgagctcttacacctatgtgcnnnnnnnnnnnnnnnnnnnngaaggcgattggcaagatcatgaaagcaatacaggcaatgcttgagtgtgcatattttggaaggccttgtcagtcatttagttgtcacatgagctttggcaggttgtttaactggagaccctcctccatcatttttaaatgggaggagtcatagtgcctgcctcatgtggttatgtggggactgaacgagatgctgtttgtaaaggcatgtgccaattcacaaatttcacgctgatatcatatagctgagatgagaaagtgtagcttcttagtagtgcccttaactgtccacctcacaccagtcagaatggctaagatcaaaaattcaggggtttcctactaagcaaacttctgttggttaaaagggcggacggatcccagttgcagtgaaatgcatggagtgatgttagagattaggagaccttgatgctcttgtacaggacctggattgggttcctagcactcacagcagttttagggaatcagttttcatgtaccagtgcttctgtcttcttcagatacttggcacatacttggtacatgtacgtatatgcagacacccataaatgcgcataagatacaaataagtaaaattttaaatactactctaatacgttgttttcagagagcatcttatctctaggaaaagtacacaggcttccagatactttttttttttatgatgtcattttcttttctttttttaattagatattttcttaatttacatttcaaatgttattctcttcccttcatttcccttctggaaacccccctattcctcccccaccaacccacctacttctgattcctggccgtggcattcccctacactgaggtatagaaccttcacaggaccaagggcctctcctcccattgatgactgactaggccattctctgctacatatacagttagagccatgagtccatgagctttctttgattggtggtttagtcccagggagctctggggttactggttagctcatattgctgttcctcttatagggctgcaaattccttcagctccttgggtactttctctagctccttcattgtggaccctgtgctccgtccaatggatggctgtgagtatccacttctgcatttgccaggcactggcagagcctctcaggagacagctgtatcaggctcctgtcagcaagcacttgttggcatccacaatagtgtctgggtttgttgtcagtatatggaatggatcctcaggtgggaaagtctctagatggccttcctttcagtctttgctccacattttgtctctgtatcttctctcataggtattttgttctcccttctaagaaggattgaagtatccacactttgctcttccttcttcttgagctacatgtagtctgtgaattttatctcaggtattccaagcttctaggctaaaatccacttatcagtgagtgcctaccatttgtgttcttttgtgatttggttacctcactcaggatgatattttcatagttctatccatttgcctaagaatttcatgaattcatcatttttaatagctgagtagtactccattgtgtaaatgtaccacattttctgtatccattnnnnnnnnnnnnnnnnnnnnnnnnnnnnnnnnnnnnnnnnnnnnnnnnnnnnnnnnnnnnnnnnnnnnnnnnnnnnnnnnnnnnnnnnnnnnnnnnnnnnnnctgggttctttccagcttctggcttataaataaggctgctatgaacatagtgaagcgtgtgttcttattacaagttggagcatcttctgggtatatatgcccaggagtagtgtagctgggtccttaggtagtaccatgtccaattttcagaggaaccaccaaactgattttcagagtggttgtactagcttgcaatcccaccagcaatggagtgttcctctttctccacatcctcaccagcatctgctgtcacctgagtttttgatcttagctattctgactggtgtgaggtagaatctcagggttgttttgatttgaatttccttggtgactatagatatcatttaaatccatttggcccaaaacttctgttagtttcactgtatctctgtttagtttgtgtttctcttatctgtcctttgatgagggtagggtgttgaagtcccccacaattattgtgtgaggtgcaatgtgtgcttttggctttagtaaagtttattttatgaattgtgggtactcttgtatttggagcatagatgttcagaattgagagttcatcttggtagatttttcctttaatgagtatgaagtgtatttccttaattttttaatgacttttggttgaaagtcgattttgttcaatattagaatggctactccagcttgtttcttgggaccatttgcttggaaatttgttttccagccctttactctgagacagtgttagtctttgtccctgaggtgggtttcctgcaagcagcaaaatgttgggtcctgtttgtgtaagtcagtctgatttttttttgtcttttttttttttccagagctgaggaccaaacccagggctttgcacttgctaggcaaccattcttccactgagctaaatccccaacccagtctgttagtctatgtcttttttattgggaaattgagtcctttgatgttaagagatactgaggaatagtgattgttgctccctgttattattgatattacttttatgtttgtgtcattatcttcttttgggtttgttgaaaggagattactttcttactttttccagggtatagtttccctccttgtattggcattttccatctattatcctttgtagggttggatttgtggaaagatattgtgtaaatttagtttcttcatctatggtaattaagagttttgctgggtatagtagtttaggctggcatctgtgtttccttagggactgtataacatctgcccaggatcttctagctttcatagtttctggtgagaagtctgatgtaattctgataggtctgcctttgtatattgcatgacatttatcccttattgcttttaatattcttttttttgttttttgttttgtttgtttagtgtgtttgttgttttgattattatgtgacaggaagaatttcttttctggcctaactatttgaagttctataggcttcttatatgttcatgggcatctctttctttaggttagggaagttttcttctataattttgttgaagatatttactggcctcttacgatggaaatcttcactctcttctatacctagtattcttaggtttggtcttctcattgtgtcctggatttcctggatgttttgggttagaagctttttacattttgcattttctttgactgttgtgtcaatgttttttatggtatcttctgcacctgagattctctcttctatctcttgtattctgttagtgatgattgcatctatgactcctgatctctttcctaggttttctatctccagtgttttctccctttgtgatttctttattgtttctatttccatttttagatcctggatggttttattcagttctctcacctgtttggttgtgttttctaagggatttttatgtttctgctttaagttcttctacctacttacctgtgttctcttgtatttctttaagggagttatttatgtcttccttaaagttcctctatcatcatcatcatcatgagatgtgatttttaaatcagaatcttgtttttctggtatgttggggtaaccaggatttgctgtggttggacaactgggttctgatgatgccatgtaaccttggtttttgttgcttatgtccttgcccttgcctttcaccatctggttgtctctggtgttatctggccttgctgtctctgactttgacttgcctcttctgcaagcctgtgtgtcagtactcctgggagaccagtcctctcagggaggaatttaggtatggagagctctggtacagggtcaggtatggggtgcagaccaagaccagaaggatcctgtccccagctgatccttggttactgtgtcctgatggctgtgtgagggtccctcttgggccaggaatttaagagacctggtggtcttacttgtgctcccaggtatgtaggcacttctgggagaccagctctctcctggtggtatttgagtatgtagctctgtggcacaggatcagcttttggtgcagatggaaaccagaaggctcccattccatgctgcccctctgttcctgtgtcctgagggttctgggtgggttccacagcagcagtggtgggtttacctgtactcacaggcctatccgctctcctgggaggctcaccctccccccgtgctatttgggtatcctgaaatttttaaaatggctcttctttgagatagaggctgggtatatagggaagggaagcttaagtagtttcttggtgggacgaaagagtctagacctataggcatattttccaatggcttcacttattctcccaggtacctctggcctatggcatttcctttttcctttcctttcctttcctttcctttccttttcttttctttttttacatatatatttattgtgaaacattattctcaaaacaaaatatatgatacagttgactttattttaacacatattcttatatacgaactactgaaaattatatataattcatttccacattcagttagaatgattttattttcaaaaacaatttttattagatattttcttcatttacatttcaaatgctatcctgaaagtcccctataccttgcccccccccccccgccctgctccccaactcacccactcctgcttcctagccatggcattcccctgtactggggcatataatttttgcaagaccaagggcctctcctcccactgatggccaactaggccatcttctgccacatatacagctagagacacaagctctgaggatactggttagttcatattgttgttccacctatagggctgcagaccccttcagctccttgtatactttctctagctccttcattgggggccctgtgttccatataatagatgactgtgagcatccacttctgtgtttgccaggcactggcatagcctcacaagagacagctatatcagggtcctgtcagcaaaatcttgctggcatatgcaatagtgtctgggtttggtggctatttatgggaaggatccctgggtggggcagtctctggatgggccttccttctgtaagattctaactgctgttacatgggagttggtgtctttgggaccagatgcaatacacacagtctccctgattcttttggaaccttaaggtataatcactttctgtgtgtcccagacatgataaatccagcactcatttctggaagagatgctagacagactctctgttcccagtctctgctacaagactttcttgtacttcactaggctgatacactggctattggcttagttactttctaatttacccacaatcctctgatttcagctctaccatagtcattaccatagggaataaagaactgatcagagacatgaaacttctgcatactatcttcaaaaatcattgataggggttccccaagagggcatatctttctaggctcctaattaagaacatacagagcattctcacatcctcccagctctcctcttgccacctaacatgtgttaagacacacgtcccattgccctgctcattttccttcctaccacctcataatccatggcttgcgtgaggtaattggtttcttatagaaatgtccttattctgggacatctctctcttgatcaagggaggactcttggaaccaaattcttcccatatgagtcaattgtacttttcttccttaagacaaggcatagtaagacttgcataaccttcatattgagcatcatattctaaacattaaccccatcctctgtctgctctaaggttgttttgtactcaaaatctagaaatagagcacaacgatgtttcttaaaatatgtctaaaggaaatacagggacaaaatgtggagcagagactgaaggaaggccattcagacactgccccatctggggatccatcccatatacaaacaacaaacctagacactattgcagatgctaagaagtgcttgctgacaggagcctgatatagctgtctcctgagaggctctgccagagcctaagaagtgcagatgtgaatcctcacagccaacctttggactgagcatagggatctcaatggaggacttatggaaaaggctgaaggagctgaaggggtttgtgaccccataggaagaacaacaatatcaaccaaccagactcctcagagcttccagacactaaatcaccaaccaaagagtacacgtggaggaacccagagctccagtttcatacgtagcagagaatggccttatctggcatcagtgggaggagctgccccttgtcttgtgaaggctctatgccccagtgtaggggaatgccagggcagagaggcaggagtgggtgggtgcatgggggagcaccctcatagaagcagtgggagggggattggataggaggtttgcagaggagaaactgggaaaggagataacatttgaaatgtaaacaaataaaatattcaataaaaaaaataggaaactgaagttagcggatatctaatgcaaactttaatgcctggttattagtggtacgtaaatactggcatggaaactttaatgccatggtggttagtggtacgtaagtactggcatggaagagttttacttgttgctggtcattgtacattggaaagcatatagtttcctttggagcatggcaattttgatattataaatgtacgtaagctccatgttttgtgtccctgctcctccctctccatccttgtctctctagccacacaggcgttttgtttttgggagataaactgatgtttttatttaggagcttttgtaatttccctttgtcctgaaaccctactctttatatcttgtccatctgagccttctcttaaggtcctatcttgaatgctgcaacctcagtttggctactacctatccaaagtagccctcgagccacagttccttccccactcatcatattctttatttccctgtctgcatgaatcattggaaatgtgtacacacccatggtacatctactggaatagaatataagcttcaagaggacagaattatatctgtcatattctcagttatgtcctctgagctggcacatatagaaatcaacatatagctgttgaatataggaaaaattgattgagattatcttattttagatagaaagaattattactaatattggcttacctcttactacttattttattacttactatttgatttccattgttcatggaatgacatgacctatagaagcatgggaataagattctcaatgtatagatgtcatgctattggtgaaaatgtatctctcacaattcttttgttctataggtggtggtagaaaaatagcttagctctacttcctaggcagaataggaaaccctttgggaacaggactcatggtttatatttctctcattttaaaaatgatattaatcactcaggagatatattgttagttgtcattggtgagagaaaattgcaggccattgcattttctgtgattaaattgagaagactttctaagggaggctgaactgggaagggtgtttgattgatagagggacacatatttaatttctggaagggtgaagttatgagttgaggagcttctgtcaaccacgagatatatgggattttcatttgcataagagaacttggggtcaagacttaagggaaatgttctcatttcaggattagaatctccactgagaaggatcagaggttgcgattcagtaataggattgttccagaaactgctgctgtgtaacaaattaccagagagcttagcagcagaggccaatcattttgttatattcacacaggaggatatgggtcaagaagtcagtggggctctgcagggaacatgctgtgtgtgctccagctgtgagcaccagaagggaagaagagacttgatgctgaggctgtggccagctggagattcttacttacaggttagacatccagatctcatcacgtgacctctgcaagaggcttggctgcttctcagcttgattgtctcagtgtatgtggaactcagagcttcaaggacctgtatccaactggagaagatggaagctgcatggtctttcatcgccagcctttgaaaccacgtggtcttccatcttctatcatcctggttgcaagaagacacaaagctcaccaggattcaaggagggaaaacttcctcttaatgggaagaccatcttacttgttcatacaaggaacatctaagaaatttggaattacgagcttctacaagaataaaataagtaattggtgaagaaggttggatcattgtaccttcaaagggagataagcttcaaacgtgctaggaatccaggtttcatccactgtaaatttgctgggattatcaacagctttctgaccaaattggagttcttctgaggaaatttcctctcttcattctagtgtgttcagtaggtgaaaactgtcctgacatcacttagacccatagtaaatcaggaagagttactctcagatatgacatcatgcccttatttccaaatgaccactcctctgagcttttccaaacacaccttttacagcccatttggatgaccccttttacttgtggcccctaccctccaccttgttcccgagtctgtttagcatttcattgagccaactgctcttggttcttagaacaccgagggataattgtgctgagtttataatacttttctaagcagccactagtgaacagattgaaatccccaatctcatttatactgccatttatttcaatgtgtgtataagaaatagaaggaatgggtattagctaattgtaccatgtagtcctattttctcaacaatactgtttattaacacagctgatagaaaatgaaattaatcttcattaaaaaggctgctaatagaaaactgagagtattaagcatccaggaataaagtgaagactggtaatcataatgttgctattttgggagttttctattaagctcttatacgataatatatcctgaagtctaatcataaattttgcctggagttcagaaatgtggcagctgtattgaggcacgtttacagaaaaatcatgatctcaaattgaatttgctggagactatatatcaatttgccaccaggacagacagtactctaaaccctggactctgcccattactcactgtagatgtgtctgtcatctcaaacagagcagagttgtgactgctataaataaatagtgtattggggatttctagttgagatataaaaaacaatggtaggagttgagatagcagatatagttaccacaggctctgctatttcctcttagctttaaaaataatagacatgctgaactggatgggggaaagaccaggaggcctcgaccccatacaaaaattaaggaatgatgatagtgggagaaatagttttccctggggaagaaaacaccaattaccactccaatattaaaatatcagccctgaaaaacatacatacatgtaacattatacagactgagcaggttataattaggaatatatatataggcttgttgcttaggcacactcaaatgctataggatagcttgttatttcatcatgacctgcaatcacttagatgattatattttctgagtttctgattagaatttccactggtaggaatttttaaaattattacattttaattcctacaacactcttactatctaatgattatcatttcttaatttctgatcacagattattgaattttggcatcttatacaagaacacaaaagagaatgttctagaaagatgtgtgtgtgtgtgtgtgtgtgtgtgtgtatgtttgtataatatattaatatattaaggaatacacacacacacatgcatgcatgcatgtaacagcaaataatgaaataaagaggccatgaattttaaagggaacaaggaggagtatatgagaatgttggggggggggagtgaagggaaaaatgatgttattgtattataatctaaacgctaagataaacaataacacattacttacacgcatgtaactctcttgttaatcatttttttgtcaacctggccagactcagaatcacttatgtggcatatctctgagcctgtctgtgaggatgtttcccaggaggctaaactgaggaggagagcaaacaaagaagcataaaacagcaactagttgggaaggcatcagaaaagcctgatgggtggcagcacttgtggatgctgcttcctgattcgctgagctgtgagagagtccttccctccatgcagctgtaggtcactcctgctgagatgccttctttgcaaccttggattctatcctggaaccagtctcccagataaaccttccctccttcaagttactattttgttggtgattttgtcacagcaaggagaaaacaccaattgccacttcaatactaaaatatcagccctgaaaaaaaatacatacatgtaacattatacagactgagcatgttataattaggaatatatattcctcaatatttaatatatagcaaataatatatatgacttgttgctaacaaacaacagagcgagttttaaaaagaagagatgagacagatagccccgactcactgttagaagtggcatacatttagaaagggtatgcttaccaattatggtaaaaaaaaaaaatcttactttgttgttatttcgatttagcaaggcatatctttttttttttttttttttttttagttgatggcaatgcaacttttggtatcaattcaggctaaattcaaaagttatgaaactcaagtgttgggaagaacaggaagcctcatactgtgtcgttgctactgtgacaataaagacaggatgtggcagaactgctgggtgggggtctaacttgctttttaatctggtttctagactttttctcttttgtgttcttgaagtagacacttcacttcactaatctgtgtttaaagagaatttggaatggtaatcattagctagtaggcgttttaggaattaaaaattaacaattaaaaaaatttctaccattggattttctaatcagaaaccctgcaaacataatcatctaagtggatgcaggccatgaggaagtaagaagccatcctataacatttaaggtcgtttaagctgtctttttcttggtactcttattagatacaatgaagtgcttcactagatgttgtctgggtatagtagtcagtactatgtgaatagtttaaggagtcctgggatgaaatggtgacctcattgtccctaacagggccagaatctctaccctagtgagagtttgagaattcctcaaactaaaagctatgtaacacaggttatttctagcagggggagagttatgtgggtgaggagaagtagcttaaggacaaagtttatcaacagtgagagctatgaggtggcaggcaggttttcttgaagagggtgaagggcttgtcaggtggcctcatcattgtagttccatcattgtgggacccagggtgggaggcctcatccctgctctcgttccttcttctgtcagatggctgtcttagggcgtataatgatgtggcggggtggggggtttatttcagggtatagttatagttatagttcatcatgaatggaagtcagagcagaaatttaagacatgaatcaggaggcaggaattgaaatggagccatcaaaggatgctgtttactggcttgctcctatgacatgttcagccagttttctcatacaatggtagaccatttttttgctcagggatggcaccactcatagtgagatgccctgccccctgttcccttatcaaacattaaccaagacagtaccccacaggcttatctacagacaagtctatgaaggcattgtctcagttatgatttcctctttacagataggtctatgtttgagtcaagttgagagaaaccaaccatcacaatggtccaacaagtgtcacagtcttgttcctcttttttgttctctggtcctctatggtcattcatacatgagctgaaaaggttagaaataggtagggagaggacgtacgtgtcaaaaacttgacctagggtctcacaggagcctctgcctcatgggagttaagagactatcaagaaacctagttatcatttactctgtcctccaccaattgattttcttgtgattcattcttttagaactgtgttgcctactatggtggctaccagctacatgtaattattcccatttattagattgattaattaaataaacctagttcttctctccgaacattatgtcagatgcctgcttgcccacatgtggtagtacttctcagcatgtcaagagctgacccaggaagatcatcccagcaatcaaggcccatgtgttgcaagctcgtctctggaaaccccatcttccttgtcatcagtgacctggcctcaggggacctttatatttaagtagagtgatgtagtcctagcagaaagttttgagtttttaattgcacccaggttaataaactcattgttccaatgaaaataatggtttcccagcattccattctgatgagttcttagtcatgcagtgaatatggtttcattaaacaccacccactcactgtgtacttgttacatgaggaatgaatgcgactctgtctctagataaatgaataagatggagacgggagggggagaagaacaggggggagagagaaaaaaaaccctaacaaaacaaaacagcttgattaaactgcaagaagaaaatgtctatcttttattcctacttggaagactgtagacagtttaaatgaccagaccttgatgaaattctctgccattaatatactaatattaccatttattgcaatttacaagccagagaatcattggattccaaactaaacaaaggctttatagaaatactgtgtcctgttcaaccttaaaaagagtttataaaaaaggtatgtccttctcagccttaaaacgagacggcttttgctgtatgccaagcgttgtgttgactgctttgccttcttttccttgttggagtttcacaacgctctccagtaagggccagctgtgcacctgctggagagggggagcctggagcagtgccaaggccgggcactgaagctgagcagattagactcaaatcccatttcctctacttactagcttcaagagggaaaggatttgcttgactttggttagccccagtcttcttacatgtaaaacagagaacacagtttccacctcatgggattatggcaaggagcaagacgtttagagcaaagtgctaagtgtgctacctggtatgcagagtgtgattaaggaaagaggaatccttccaccatcagtgtcactcaccctgcctcatacatatcctcagcaagtatttgctaagtagatggctggctggaagaatgtcacccattctttccatcattgactcagcattctctgggagtgtaggtgggatgatgtgggggaggctgagactcattcaacctcaaatatcttctccctggacctggctgctgtttacaaatcaagcattactcattcttttcagctcaagccccccccctttaaattagatattttcttcatttacatttcaaatcctaatttcctctctgaaaatcctctataccctcccgctcctcctgctccccaacccactcactcccacttcctggccctggcattcccctatactggggcatagaatcttcacaataccaatggcctttcctcccattgatggccaactaggccatcctctgctacatatgctactagagacacgagctctgggggtactggttagttcatattgttcctcctatagggcagcagaccccttcagctccttgggtactttctctagctccttcattgaggaccctgtgttccatccaatagatgactgagcatccatttctgcgtttgccaggcactgacacagcctcacaggagacagctatatcagagtcctgtcagcaaaatcttgttgttatatgcaataatgtctgtgtttggtggttgtttatgggatggatcctgggtagggtagtctctgggtccttccttccatctcagctccaaactttggcttccttccatgggtattttattcacccttctaagaaggaatgaagtatccacactttggtcttcttcttgagtttcatgagttttgcaaattgtattttgggtattctaagtttctgggataatatccacttgccagtgagtgcatatcatgtgtgttcttttgtgattggattacctcactcacaatgatatcctccagatccatccatttgtcaaggcccctttcataagcaagtatcatattaggaaggaatacattaagcttttttgtgcaacgtggctctgatctagctgccaagcttcccatcaatgacagcaaagtgaaatcagctttggcctggaatctagggcttctggtctctagatacacctctgtcagcaggtagaaccacatccctgggctccaggacctcatttttcctactgcttacatgggagattagagtagatttccagtaaatggaagattatttattttgtgagtggggcaccaggcagctaaggtcagtggtaatgcttaggggatgctcagattagtgaacttggaaaagctacagtgaaggtattagatagccttggaagaaagagaagcattttcccaggatggtcacgctctgtgttacaaggaggacatagggagaaggaccaatagtgaacaggaatcagcatggttgttttaggagtgtttcacagtactgtttgaagccattgtgggtcacaaacaccatgcatacatcttactggataaccactaacagatggccatctggcatgaagccagtcaactgatctaaacacaatgtcatccttttgcagaaagcctttctggacatttcagcaaatgcctctggtcatgagtgtcaattcagtggtacagcggtagaccgccaataagtggtgggtatagggacactggctgggcccacagcaagcagcagtgaaactgctctttgtggctgtaggtatcccatggaacagacttagagtcagcaattgctgaacatcttctgcatggcagacaccctagaggcttttggttagcttaagcagatctagggaatagtatggctttcttcaaatgatcatcatcattatcatcatcatgataatgatcatcatcatatcttagcagcagcagcaccattgccaccactgccatcgtcatcaccatcgtcaccattttcaccatcatcaaaggaaactgaggttcaaagaaaacagcagtagaggtcagagttcaatgtaagatctctggctgcctacgttcagactttttccaagtgtgtcatgcagcctccaggatgtttttcagatattactgttaaacttcagtattctttgcccatgggcattgtggatggaattattgttctcatattattgctattttcaggcacttctgaaagaaataaataatcactcccagcagcccctgtcatcgtccactctgagggagaactcttgaaatcattagtttgtattcttcagctgtcagagttccaaattaagattgttggtggtttttttttttaagttgttgttgttttttgatatttttctcttctatatcacagattgggagttagatttttttttattttctttccagcttatgagaacagatattgaggttttattgtgacctatttttgcagtgttcttaaaggttaagaaagaggctggaagctctctgggtttcttattcatgtgtctcaaagatgagcacagaatgccccactttgctatgccaggtataactggaggtcgaagtggatgctaaaaaacaagttttgggaacagtttctgtgttcaggagaaggtggctgggcaaacggggagttttttgaacagtgccaattcagatgaggaaagagttaagcctcacatttaatcacatggtcttatagattcctgaggcggggcctggagtgggacactgtgagggagctatggatcgacatcagcaaggatcaatgttgtgtgatcaccaccaactgtatgtcattatcaggtgcagaggctttctctgaagtgatcttgctgagaggatgatgtagactccctcttctgtcttaggataaagtgggaggatgaattctttctaggactctgtcttttcctagctgggctggttcttctttgaagttttacccactgagtcaccttaagaaagaaattcttgaaatatggctttttatcactatctcccattccttggcatttttattatgaaaatgccatattttcaagaacttacgtcatatctaatttaaagcctagtattaaattaacctaccgaagcacatactgctcatcagagcaggaagctctctccatgtacagtcctttccaggaactactcttcaaaggttgtggctctcatatgctctctttcctaggcaccctgctacttattgcaggtgttgtctatttaccttttctctgattaaagctttgctttgtctattaaaggcccatgtatgtaatagcagcttcacagagtgccagtgcttacaaaaactgtcttttttctaaattaatgaagagggctatatcccaagtggtcctcctttggatgtttctttgatacacaataaagtaaagaaatttatacatgtaaaccccccctccactttctgtccactaataccacataggctttgttcttagtccatgagataatgtgttttatagtggaatgttagcagaataaatttgtgttgttaaatgtgcttagagtttgataagaagttccactcctatacagcagaagatgaatataaaaatttggaaccgatggtctcatccactgcggttttttcccatccacattcttctgtatggagtgagactctgggtagtgaccgttgcaggattcagtcatgaaaagatgttgagactctgaccatccttgagattttccagatgtacagttgggtaagacgtagatgctgttgtggacttaatggtcattatgagatgacatgatgccctcaccatggctcttatttaatacaaatgatttaatttacatcatatggtcattaggcagacacttgaaactgcctttggctggctaaacagaaaaggaatttgttaagagattccagccatctactgggatcacgggggatgagagtgggaacagagatgccagagccacatgtagtcacatcagagagccatcctggtgagctattgtcaaagtcatgctgtgtaccagatgtgaggcttgcatggccacagctgctgttagctgcagacattgctgcctggcacacagacctggtacctggctgctgcaaccacagtcaccagaatgaaagtccctgctccctgagtcattgactcatgatgtgaatcataagggtggtgatctgtccatgaccaagttgtgatctgtgccatgactagtagaagtgggagaaatgaaggtctggctattcaaacagctttaaaggaagttgttttgtgtccaatttgagctttgtatggtgggcaattcaccaagtacaagaaaggattcagaagctgaccccataatttaagctgtacatagccaagcaatttcatctaaaggcattctttcaagccttccattttcatacttgctggcatcttgttttctttaaaatggcttattgtttgttggtttgttttcaggaaggagaagaaaatataacattaaaattgttaacattattttcttgaagtttctgtaatcaatacctggagataaatgctatgctgaccccttcactaccaggaccacctcttgacctagctgatcataacactagtaatctggaaatgtgtagatcttgccttccaagagcatagctctaaaaggcagcagaaaagatatggaaagtaatttaaatgaggcttaaaactggtataaacttagcagtttctcctctcatttgtattaataatcagatcttggaatttccaggcactaaaaatttcagcatgaggatctatgacactgtaacagagttcaagggtgattatcaagaggaagtggaatggaatgcttgtaaacaatgtgttgaggattactcaaagggggctggtggttccctgttgtgggagccagacagaactaggcataaaccttaaattaactccaatcaatggctagaggcaacattttccactgtttcttatcctcacttgagaaaggtcaatgataattcttttttgttgttgggttttttgttttgttttgttttttttgttttttatttttatggttttagactttattgtagaaaggcagggggaaggagagaaggtaggaagagggagagaggctggccatggccacatggagagagggggaggggaaagagagagaaggagggctagagatgagagtaagaaaagtgagagtttaaagagccaatgatggttcttaatgcagagggctggtgtagggaattcatgcaaattgcctggtaaataaatgttcagtagatggtagttcttattctaatccccagcacagagaaaagaaggtgcttctgggaaagcgagtgagactcttggggccattttcaagcccaataaagcacttgaatgtggtgagggtagtgtgaactaaggggctttcaaggtataatttctctctcccctccatggttaactctggaataacactacttgagaactggacaataattagttttctgaacttagccccttctgcttttgatgtctaagtactaaccatgctggctgtgcccagaatatcagcactcatctgtctagaaagaggcacccatttaccaggatagaaggcttctgctttgtccaagtactagaaggttctaaaaagtgtgacagtcactgtcaaaatgatcactctgactctgaccttccctggcttgatttagccaatgtgttgagtggtcagtggctagaagaagctatcagagcagccatgagcaaatccttaataaaggtgagattgatctagcacttgcaaacttgcccataaataccattactgtttgcaccctttcaaactgggtgcaaacagtaatggtaactctttattttctccaacctgaacaactccctcccctatcccctataaacaactctaataaaaattcattgggatagatttgcaggcacatgggaaaggaagaaaggggatgggagagggagaggaagaggaagaagggaaagagagaaagacagaggggaagagaggagaagaaattagaagttgcaaagaatggcatagaaagaatgggaggaggacaagagagggtagtggggtaaatataacagaaatacattatatacatgtgtaaaaatgtcataatgaaagcccttattatataattaatatatgctaatacaacattgaaaacaaatggcaaaaagaatagtgttttcttttcctctagagtctttgatactcacacaggtacattactgcttacagtatcacgctgtcattttgtaaggggttattatttgatgcttttccagcaaggcagctgactcaacatgatatagaggatgagtctgaggagacagatgcagagtcctacagccaaacattagggagatctcagggaggcttgtggaagagtcgggagaaggattgagggagcagagccaaaggaggggtcaaggacatcaccagaagatctacaagaaagtcaactaacctgggcccatgggaaggctcccagagactgagctaccaatcaaaggacatgcaaaggctagacaaatcccctatacatatgtagtagatgtgtagtttggacttcatgtgggtcccctaataattggagtggggtctgtctttgactctgttgcctacttttggatcacttttgcctagaggggctgccttgtctgatcctaatggtagaggatttgatttgtcttgctgagactgatgtgtcagggtaggttgttatggggggaggacggtaatggaaagagggggtttatgaatgtgggactgggaggagaggagggaggagattattttcaggctataaagtaaataaattaattagtaaatacttcttggtaattttcaaatacacaatctagttattacatttcaagtatacaagccaagattatcatactgtacacaagttcccttaaaattatctattgctgagatcttctttgatttttttcttcagagacttgaagttcttatcatacagatctttcacttccttagttagagtcacaccaaggtattttatgttatttgtgattattttgaagggtgttgtttcactaatttctttcttagcctgcttatcctttgtgtagagaaaggccattgatttgtttgagttaattttatatctagctacttcactgaagctgtttatcaggtttagaagttctctggtggaatttttaggatcacttatacatagtatcacatcatatgcaaatagtgatattttgacttcttcctttccaatttgtatccccttgacctccttttgttgtcaaattgctcttgctaggacttcgagtactatattgaataggtagggagaaagtgggcagccttgtctagtccctgattttagtgggattgcttccagcttcgctccattttctttgatgttggctactggtttgctgtagattgcttttattatgtttaagtatcgtgtctctagctgcatatgtagcagaagatagcctagtcggccatcattgggaagagaggccccttggtcttacaaactctatatgccccagtagaggggaaagccagggccaagaagtgggagtgggtgggtagagaagcagggtggggggagggtataggggactttcacgatagcatttgaaatgtaaatgaagaaaatatctaataaaaaattgaaaaaaaattattcattgcatttatctgacattttatgttctttgaccactctctttaactcactctccagagtctaggcttttgttaccgtcattctattctctcttccgatgattttgacatttttcttttgtattccatatataaatgagattataaattgttattctttctgcctggcttatttcacttgacttaatagtgtagacaactgggtgtaatcctacctcattgctacaaatggtataattcaccctttctttacttcaggaatgaatagaatttcattgtctagctttatgcttaggatatgacgtgtcctccaaaagcctagtgtgtgaaggtgtgacccccaggagatgacagtttacaccttcatactactgagagatgagcggatcatgaatgagctcagagctaaatggactatgaggtgatgggaacagtgggaaatgggtatctgaagtggtatttctgaagggtctattctgtcctgggccacttcctgtctaactgtgctctgctttctagttagcatgaggggaaaagctttcctttggcatgctcttccttcttggtgtctcagccttaccttcacttcttcaccctccttgaagaagtggccaagatagaaccagcaagggaaggtgtctcagaagggccacctcctagtctggactaatagccctgtttagtagtgttaataagataaaggaagaaaccaaacagaaacatttgatggaatcttttctcaatgggtgaagtacagctcactttccctcactgactgataaagaaagatccaagacctgagaggcttagttcagatggacactgaccttgactttcccattgactttcaccatttggaaagtgtgacatcagaaagaatacaagtggtccattttatcagctctactataaatatggagatttgagcagcagatgggtggtcttatatgaaagagaagaggcaagtatgagggcacacagctttggctttctcaaaacaagtcccaaagctgtctaactagactttgtatctggccattcataggtaattctcataacagccatgaggtggggtcagctttctcttgcctcaaccacaatacatgctactgactatggcaatgggtattcacaaaagcattaatactgggtgttcaaaccactcatgaaatgggcacttaagtaaggttcagggcagctgaggtaaaaggccagaaggttttaaagggagttgggtttgctctttctttgcttctttctttgcttctttctttgtttgtttctttgtttctttctttctttctttctttctttctttctttctttctttccaccttgagaccttgtattaattaatatgatacaacgtggattctgtcctgcttctcagacacaaaagaaagttaaagaagagacataatttgtgctctaagacatctgcaatctaacccagcaacttcattttcccattctttgtgcctcactcctcactgcacctccttctagtggttccttcctaaattgagagagcggaggcaaactcagccactgtgataatgaaatcttatgttgtggtctttgattgtacttcccttccggagcttaatatttcacatggttaatactaatgtgctttatagggaaactccttaatttgaaaatgttgcagatggcttttttatcaggagctatggactgttaaatgtaaatagatctaattatgaaccattgttgtggaataggccatcttaaatagcaaaagtcaagtttttaagaaattaaaataaaagaccttacattttgaaaggattgaagaataatcagcagcctttggttgattggttttcaacaagttataaggcaaatacaggctgccagatttccatgaatataagacttcttacaatgtgagttcatagaattctgagcaagatcttgggcagagggattcctgtgtacctgcccactgagtttgagcactagaaagtgtcttgggttgaggtaccaaggagtcctgaagtccagggacatcagagtgtcctcaaataccaactgttagccttcagagctgctctgaagatgaagatacaagaggactgactttgtctacaggaattctttgcgttggattatcctacattgccttcaggaaaatgtctagtccagagcgatacgtggataagcgcagacaaaaagctaagtgaagagacccatggcgttgtcatgcatggtggagtcactgatagagccctaaacaaaaatccctaagcatacaagaaaaggcaaagtgatttagaattcaggatttctagctggtagctggaactagctaggtgtggtgtaaagtggtaacccaagtttcctaagcaaaaatggggatcccagatttgaattaatgtttgtctgaaaaaatagaagcctatgtgaagaaactggttaactttttgctgcttagagttttgcttgggccttaaaattgcatcagtcatgcaatttgatacatgcaaaataatcatttttgaggctacataaaagacgtttcattgccttgtatgaaatagtttgttagcatgattcaatgaaggcttcttactgtgaaactatttgtttctgtcccagaatctcattttaacctgggattgctgagtttcggctacccagcgtatcacttgcccggaccatgtaatgttcattgaacacctaaagagggagaaatggttttacatactgcctctttgttttagatttggatgaactgagttgttggctatgaatttggggctgtctgttggactggaactttttgttgtcagaaataccaacatgaggaaatagctcattccctttggaaatgaggagtattttatttattacacttgtaattcttccacaatttcatacacgtatacgataaaatgttatatgtatcccgcgcttccccccttgagctcttcttacactccctaccccaatacatgcctctccaaaccctatattttttatttttctttttgaaaacccactaagttctttgtatttgtgcaagggtgtaaggccacccaccggagcataagcttactggtgttcataccttcaaaggagaatgattctcaatctctctgtagttataaacttctaatagctccaagtttttcttctggataacatctcctatatataggcagaagttttggctggctttgtattgtgctgatcttgtgtgggtagccatagcagctatgagttcatgagtgtactagccttggcatgttcagaaggcagcatttcatagcattcctccccatccccaagcttgtatgtttttttctgcctcccgttctgtttcgtgcactttggttgaggggagggaggttgttgataaagttgtctcatttatggctgagtaccacgaatattttaaattaagttcatcaactgtattattctttgaacttcttgatcaaatttgtgttttctattttcagaacgctatttgcataattattttcaccagtctttccgtttcaagaggaaacatgcaactgagcttcactatccagctcctaatattagatataaatatgtgatgtgtgaagattcttgtagcttagaaaaaccatctttcttcctcaactactcagggtagaatgggcaaggatgcagcccccactgtcttcttgggaagttgatcaattataagatgcttctactacatgctactctaaattggttttatcttgagtcccatgggcccaggtcctgggatttgtatgtcttttacttatttattttcccctttcatatgatgaatgttggcctgtattgaatttgtggatcttttgcttgcctattgcccacagagaccagaaaagggtgttggatagcatggaactggagttacaatttgttgtatgctgccatatgggtgctgggaactgaacactagtcttctgtgagtgtagctggcgctcttagctaatgctaatctatctctctagtgcaggccttgactgtgggggccatccttagctgttcttctttcttgttggttcttcttgaggcagtggagggggaagagcaccaatgggggcaagactcagttttaggagacatttagggttgctgtataataataaaaagtttacctatctcaagtctaagtcactttgcttcagtagctgacctgccttctgagttcctcggaggcaagaaactgtttagtacctcatcataaaacagtggggaattaagtaaagtagcttttgttctatccctgcaggaactgcacagcctctaacttccagcctgctagttgaagtttcatgaagaaaggagagacactttgaaaaaaagattttaatctttatttttaagttctctctaaaaagttttctatgaatattctgtaataaaagggggaaaagggcttttaaaaggggaataaagatttctcaggaaaaaggggtaagggtttctaaaaaaagggggggggggaataagggttgcctcttttctttgtcctcagcacttatacctctttcagaatacatgatcacatggtaaaaagttcagtgcaagtttacacataaattcaaatcataaatcaaataagtttacagcagagaatgtttacatgcacatccattaggaacaattatctggctaaacattcatcatctgttaccagctctatgggtttatggagagttaaaaaccataacgtctgtgattaagatattagtgaagttttgtgtagataaacccagtcaatatttttatcttctgtccttccacctatagtaaatcattatttccctttttatgatctttggttaatggttttacaacctcatggaatgtgttctgagaagtagatgccttcttgctatctcatgagcaattaactcatgacatttgaagactggcagagttgtcattgtagttttgattatcagaaaagaacttaataattcctataattttaggaattgttacaggattaagaattaagaaataatctatttatctatatagcatcactacaagacagtacatttttattgatcgacagagatctgctcaaatatgtggggatgtgtgtgtgtgtgtgtgtgtgtgtgtgtgtgtgtaaatcctgggcatttactacaggagcaaatccattgtagattttaattcaaagcagacccatcttaggaatattacctgctagtttttagcttctccctattggctcctggtacttgacttattagagcacatctaaagataaatcattctgacttctacaatgtatgtttttcaccagggaagatccactatcagttccattgatattcagcatcagatcttcatgattattagaggctaatagtctccatttaaagagattgccttaaaaacaactaattttgatgtagaaatctcaacttcaaagaaaaatggatttttctagtgtgttttctttcttcttatgtctaagacagcatatcacactgaatatgccaaataaaggcatttggaatcacagaattaaaaaaaaagaactaattttagtagatttgtagagttaagaaaaaaacaattctccctttggaactgaaaaccttgaagtgaaatattttttaggatattataaagggaagatattataaagtattatattatagtgaagataactttaccagtgtgggcaagcttctactgtgcatctctagttagtcaactacttagtcattaatgtgctaatttgctcaataatttaacaaatattctttaaacatttctgccaggtgaaattttggcactagagttataaggtaaaggagacctagttccctttaaaagaattcaaagaaaattctcccagtaaaactctctctctcccccctctttcttttcctttattggatattttctttatttacatttcaaatgttatccccttttccttgttccctttacagagacccccccctatcccaccccttcttcccctacttctatgagggtgatctcccctccacccactcacccctgcctccctacactggggcattaagccttcacatgaccaagggcctcaccttccattgatgcccaacatctgctacatatgtgactggaaccatggatcactcatggatcaactctttggttggtggtttagtcccagggagctctgtgtgatctggttggtttatattgttgttcttcctatggggttgcaaaccctttcagctccttcagtcctttctctactccactggggacccagcacttagtccagtggatgggtttgagcattcacttctgtgtttgtcaggcactggcagagcctctcagaagacaactatatcaggatcctgtcagcaagatcttgttggcatcaacaatagtgtctgggtttgctggttgtttatgggatggatccccaggtggggcagtctctggatggtcattccttcaatttctgtttcatactttgtctctgtaactccttccatgggtattttgttcccctttctaagaaggatcaaaatatccacactttggtcttccttcttcttgcgtttcatgtggtttgtgaattgcacacattgcagagagaaagaatcagagaatgagaaggagagaaaaaatgagccagaatattagaacatattgataaattttctaggaggcctagcagagcagttcagagaggcagagagagagattgaacaagtcagcttggagaggggtttgggccaggaaagctgagctgaaccagtcagcatgagttcagaaagcacaagaagaggtaagcttactcaaaagtaagtctcagaagcagaaaacactctaggcctagataagattgtatagaggctaggagctttcggtactaggaccaggttatcggactgaggcagtaagtctcagagatgacaatcaactttggagagtaaataaatgctttacagaaaagtttgtagctatgttggtgcttacctttcttgtttggtaatgtacagagtatcttccagttcatttaacaataatcactaggggtaaaggctatatatcacctcaaattctccatgtgtcctgagttgtgtcggtgttgtcttcagcaatagggccttataaccattttgtagagagcaatcaacagcgtttagaatagtttgggttgttgggatctcccatggggctgctttgtccaacaactccattagatgtaaccccttctcagaagtagaagtttactttggtgacaagggatatccaactgggattcttatcccctgttatttggtgattccatttgaccacattcacacccacccacacccccacacacacccacactagaaagcctctattgatatttcttattcagtgcacagaagatgtacaattgctttgatatatgtatatatgcctatctatctatctatctatctatctatctatctatctatctatctatctatctatcatctatcatgattatgactttctcttcctatacaattttaaaataaaatagaattgtatataaaaagaaaaatacaaggagctggacaaatgacttcagcaattgtttctcagatgatcaaaggtaaggagtagctggttcccagtctggtgttttgtctatagaattttcatatatatatatatatatatatatatatatatatatatatatatatatatatatatgatatatatttctcataaaattcctgttagtggtttggttattgcaaatttctatcctgaagattgagttttagtgactgaatttgattttgtcatctgggttaaaggagcaacgattttagagagaatcctaagcggaatgtcttctgcctttgagcagggaatgtttgtgctgaatcccaaccagaaccaatgcagggccaaatgtgaggaccgaatgtggttttgggaaagacactacagctgtcatctcaataaaggaggctttgtcacatcataggttgtgcaagaggatgatgagggtagagttatgtccagacccaggtggtccccattcttatccctgggatccatgaatgtactagattataggatcaagggggaattaagcttgaaagttagatcatcttcaaatatgaattatccaggaggtcccattgtaattcttaaaagagaatggcagaaggaaagttgtagtgaagggaattatcagagggatgcaacatcgttatatttaaaaatagagaggaaagttcaagccacatagtgtgtataacgcctacatttgcaagctggcaaaagcaaggaaacagactccttagaaccctcaggaaggggtacaggtctgcgaatatcttttaggccactagactatatatattggaatttttaattacagaaatgtagattatcaacttttgtgtttgtaccactaagagtgtggtagtttgttaatgtagtaataggtaacattgatgggtgtttcttggactaactggcttcacattaaatgttgtgagtggaaagaatagctataggctaatcagtggttcattcagttactaatgagcatttattgcatgcctacttattaccagaaactgtactagtcctgagagtaatcaagatgcaaaaattcctgccttcatgaagcttacattgctgaaggggtaaacaggcaataaatacgtgaaaaattgttagtaagtagtacatggtggggaaactgtagggagaggagatggaatgtgctgtgtgtgtgcacggatgtgtagttgcacttaattgtataggcgatggggcttccgggatagattcactgagaagattatatggaacaggtgcctaagaactcactccatggaagaagaaagcagcaacatggctttctagagaaagatgttccaggcagacacaaagcagaggctctgaggtggggtgctgtgatgtgcagatccctggaagctgcacccatttcaaagaagggtccatgcagagaagaaccaatagctaacctcctgcaggagctatctgggagacaggtccctgagtgagcatggatggaaatcttccccgagatccaggttgagcaaaggaacagtggctgtaggtcccactagcctagctgtggagccttcctcctgttactacagaaaatatgcaggctgttgccaaaagcctgcctgagggagctcagaggcgaggaatgtttcagtgctgaatagcacttttatggatcagtcacttgaattaataaggtgcatgggagacatgatgcaaaaaatgttaagtctcgtttgacatttccttgaatttcttactcaatgaactcttactctgcattttttttctttgcagaggttgggaggcgagttagctctcagggatagtgggaggtgctctaaatcctacctgcattcacaaagcagtgtgagaaaaagagactcctctgcctcaattgctcgtctgatataaactcctgaataacttttatctcggcatcttcaggcacagcctacaactacagcaccagccccatatcaatgttatttgctagcttagtttaaacaagcagaacacatagaatactttgtgtggctagcagtggacgttttaagacttggacgcatggacccagaaggaacccaatgtaatcagagaagggcagccaactggatagagaagctgggaccagactttccttgggtaattggaaatgtgagaaatgtcaactgggcttctcacacagtaaagagggagaaaaggagggagggagggcagtcgtagggcaaagcacgggagaaaagtaacatagctgactgaaggagtgaatgacgccatgtccattttggagcgcaggccttaagaaagcaatatattttagtttgttttgtgagatgctagctctaggaacataggcccatattctcagaaagctgcccccatttcaaagaaaggtccatgcagagaagaaccaatagctaacctcctgcaggagctatctgggagacaggtctcctcaggcctttgcccaatagccccatggatacttcatagagctgtgataaaatatctgtagatttctggaaagacaaagaggctattggcattttaagataataaatcttgaggtagcttgttatacatgaacattttcaataaagtgaatttaattggccagtaaagagaagatcgggtgtcaattgtgtgagagcatgtgatttttatatttcatgattagaataattcttaaccatttgtaattttgcctttccccaccaaatgcttgtacattgtagaacttcacacatccccaaatgcacacaacacaaagtttcatcctccaccaccaaatgtttattacatcatacatggaatcccattcccccagccaagtgcttactgtacagcatacacagagtttcaggagtcctcagagccacccctctcttcacatgggcggagacgtcagttcctgacgctctatggttagtttctctttcattactgcttgctaagaagggaaaattgtcataagctaaaggatggatgagggaaagaacaatagactgtctgttattgggctccattttattccaatactttcacagacttgctctttgacagtggataaaatataaacctctctagattgtattttttttttgttggtaaaattggattaaaattctgcccttctttttctcaaaagaattctgacattactaaagaaagaaagccattgtttggccttccatcccttcactctctgctgcgcatcttgcaggcagggcaaattttatgtgatggttttgtgggtatgttggtgtccctctccctctattggaagttctgcctggctataggaggtggccacttcaggagtttcagctaagatcatcctcatatcctctgaggagtctcccctgtttcaagtctctggcttgtcttggagaatgccttccccaactaaattccccgttctctcccccatccctacccacaccacagtcgatccctacccttgtttctcttcctctccctctctcacccagttccctctctccatctacttcatatgtctattttatttccccttctgagtgagagtaaagcatcctcccttgggtcctccttgttatttaatttagcttttatgggtctgtggaacataccatggttattctgtactttatggctaatatccacttataagtgagtacatactatgagtgtgtttctggatttgagttacctcactcaggatgatattttctgaaaaatttcatgatgtccttgttttaatagctgagtggtgtagccttgtgcaaatgtactgcattttcttgatctattcttcagttgaggaacatctgggttgttaccaatttctggctattatgaataaagctgctatgaacatacttgagcaagtatccttgtggtatggtgtgacattctgatacccatcccatttggagagagccaacccttgatactattaatgatactctgttatacttgcagataggagcctagcttcactgtcatctgagaggctccatccagcagctgatggtaacagatgcagagacccacagtcaaacagtaggcagaattcagagagtcttgtggaagagttgggggaataattgagggagctggagtggtcaagtataccataagaagacctacagagccaactaacttgggcttatgggggctggaagggactgaaccaccaaccaaagaacatacatgaactggaccgaggccctctacacatttgtatctgatgtgtagtttggtattcatgtgggtcatccaatatttggagtgagggctatcctgtgtctgattcaaattctgttgcctggctttggatccccttcccttagctgggctgccttgtctggcctcagtgggaaaggatgtgtttattcctgctgtgacttgaggtaccaggtcaggttggtatgtgggagtggggaatggtctcctcttctatgaagagaagggggaaggaggaatgggggaataggatgggagagtgggacttgaaggagaggaaagacggggctgtgattgggatgtaaagtgaacaaataaataaatgaaaaaaatgaaaaaggaaagagggagagaggaaagaaaagaggggaaggaaagaaggaaggaaggaaggaggaggagatggaggaagcaagaaaggtagggaaggggtggtaataaaatgcttgggaaagttagagtgtgccctgatgaccccaaaggatatttgctgagttaactgttagctgctgttacccaccatttatgcttgattaggtatcccaccctttaaggggaagactttatcctgggatactggctcaaggagaagaaatccaaggaatgtaggaatggaaaaggcagtgcagtccagacacccataattcctccccagtccctgttttcctcattttcatagttactgtagagcaactaagagaaacagtagcctgtaaagatgggcaccagtttacaccaaaacagaactgcccatgagcacaggacttggaagcagtatacacaagaatatcacaaaatataaaagctcataagacattagatttagcattggcgtcattgggcagggagtctatttacattgtgtcttatgaggtcagcaaaaacattttgaatagcaaggacttggctgcctgcagtgggtctgaaaatatgaaataaaacacacactgcagacctgacgtaggaacagggtgttccaagtttccttttgtgctttcagctgtaacagactgccttgtcagagcgtttgtgggttcctgtcatcttagaggaaaagattatttgttgagttaactgttactgctttgggaagacagaaccccaaagcacagacaatgaggggcaaagttcaatgttaagacattcaacaagcaaggcttggtgtggttgttcttcctttgtactgggatgaggcagacaaaaagagagtgtgaactcagttttcatcaatggcaatgatcaaagaatggaaatatctcagcagttgcttggtaccagttgtgccacaagctctcagatcaaaatgtaccacattgcatttcatttttttctttttttgcataatataagtagagtcaattttggataaaacacttggtcttcaggaaataatgtttcttacccctctttgcttttttctttctctcttgtctcaaaaaataatctccagaatgtgaatttaataattattcagggatggataatttgcacggaaatgtgtggcttgaaatgagtccaggcaaaacagggctttcctacctgtcccttgttacattgactttctgtctatcagcactgaatttgacagaagttgcctgtgtggggacagaagttggtgaccttgcagaacctgtaagtaagcctggaggcagagggggtaatatcctccttctttgtaaggttgtctggtagggttcactgtgaaggcagctctgtgtcttgcacacaaggaccctcaatttgagaagcaaaaatgtagtcatgaaatatctttgagtacttaatgcccaacgtttattctcagggcttcctgacagggtctttacgtgttagagtctctgcaatggaatgggtgccaatcaaaaggcatataactggagaagctgaagcagggtgaaccaaatggatttgtgcccagtctgttgcttgggtcggggtggagaattccaagtggcaagtgcaaaagtcaatgtattagagggaaaatttaaaaatttttctccaaatgtttctttttggtttatctttgtttaccagattaactacagacttgtattatttgtctcttacgatgttttgattaggtgttttgggtttgttttggcttttgttgttttcctgtcaacttgacccaaggcagaattaccctacaagataaaaccacagttgagaaaatgcctcctccatcagattgacctgtggggaaaaagatgttttcttgatcaatgattgatatgggaaggcccagcccaaagtgggtggtgccacccactcctggacagctagcactgggctatgtaaaaaacaaactgcgcaaaccataagtagtatacgagtcagctagatgtttctctgtggtctctccatcagctctggactccagatttcccgctatgacttcccttcacgatgaaagatgaaataaacgctttcctccctgagttgcttttggtcacagtgttgatcagagtggtagaaagcaaagtaagacactctcgacatgtagacagtacagaaattatttgagggtttttagttttttgctcttctcggctttgggcttgttgctggagatccagcaagcaggtggtgacctgtcaagggtcacactctggtggcttggtcatatagacagtgagtactacagtgtttgataagggagagagaaagaatgggaaaggtgggcgtgtcccaccgggtgctgagaatgaagaggggctttgagacagggcaatatgagagtgctctatcatgtgtcaaaatgatggcgcactccagctagacatagatggggttgggtggtgggtgacgactctgggaaataacgacagtaaattccaaacagtactatttggcattaaggcattttggtagatgggaagcaccagagaacagaaatattagatcagaaattctaaccaattattgtgatgaaagcagggtaccacagaggcattcacccttacctaaagcctgtgtgagccttaggaggattttgtggcagatactcggaatattcccttggcagtcactgttctttcagaaggtgacagctaaatgttacctcaactacagggacaaagaactatacattaagcaggtctgagacaccaggagttgacacctggggagcagccctctaggagggagtgatccatggttgagtctttgcttggtatggtctgaatgaccctaagggattgagttccactgcgcacaagagttattcaatcatttacacactagtcctggcttccctcctagctctgccatgcttccacagccctggcatttctctcctggaattgcttctccaaaaatacttgctgtcgaatgattaactctggatctagttttggtgaaacaggttttggctgccagggggaacacagcaagatagtgccagactcaagagcaattccaaagtgtgtagaaatgaccaatctgagtgtaatctgaatagaaggaaaggaatcttagattgctcaaggtatatggtatttgggggtgggggtgggggtgtctgagaaccgactatataaagaatggagaaggttaatagggcttttggtgaaatatgagggatttggatctgtgatcctttggggaggtagtaatgcggatttcaggggacaggctagtttgggggccacactggaagctgagtctcagtccacagaattcagagtagctgtggggatgggtgtgctcgctcagatgctgaacgggagaaagaaccccacagggactttgcaatgggataaagttagacttataaggcagaacctgccaaagggaagtgtggttggtctggaagactggctaagggcacataggggagaaacccgatagagagagacttgtgtcaggagtgggaggaggcaagcagcaggaagctgcctcaaggctttcattgggagaatcttagctgctgtcctgttaatttggaccaattagctgcctcttatgaggctatgccagtgtatggcaaatacagaagtggatgctcattgtcatctattggatggatcacagggcccccaatggaggagctagagaaagtacccaaggagctgaaggggtctgcaaccatataggtggaacaacaatatgaactaaccagtacccccagagctcgtgtctctagctgcatatgtatcacaagatggcctagtcggccatctctgggaggagaggccccttggtattgcaaactttatatgccccagcacaggggaacgccagggccaagaagtgggagtgggtgggtaggggagcagggcacggggagggtataggggactttcgggatagcatttgaaatgtaaatgaagaaaatatctaataaaaatttgagaaaaaaaaagaaatataggagtgtctctcccacttaaaaagtttcattacttgaaaacagatgaaccaagcgttgcttaggagagggattgttctaatggctagataagagtaatttctaattatagataagcatgacttggttggcacactaaagaatgctgccctccatttagaagatttgtgtgaaattggatacttaaaaagcctttagatttactctagtcattgtataagaattttctttccaagcttttgttgttggtgttgctcatttttatttctgttttaattagcacatattttaattttatgttgcccaaaaaataaggtttaatctcatgcctgatggtcctattacttttgaatagcaattttactttctatagtctacttagtgtgattttgcaggggtgggggcggggagcaggcggaatggaggcaggaagatctatgtcaagagttgattttagttgactagtatcatgacttccacagcttattctttaagattcttacttctctgtgcccaaggttcttcactcgtaaaatggagataataatataacctcggtgggttattgtagtacgatacaggttaatttatataacgtgattaaaacttacctgccaaagagtcttaataattatgttatttccttatatatcattgctttaatattacatgtgttcggtttttttttatttctatttattactccttactattattgaaatcaaagagacagctaatactggaatactgactgaagtagaaaaatggttagtagtccaactgtttgttagtgggtttttttttcttacatttatcacttgttaatgctactgaaaaaggagaaacactttgttgtaaaggaaaactgattcaaccactaaacagaagaccagacattgtctctcagttcctctgtcaaccatgtgggactgggcaggtccactcattttgaattcacttttctcgattttaacatgtggaggtgggaagagcaaatcttttgagtccaggctttttttgaacgttgtgaaaaactcttttttttttttttttctttgagtactggtttaaacagcactcttaaccatagcatgtttttccctaagggaaagataaatgttcaaagaagagaaattggaaaacatttccattaggcaaatagtttctggaaagtacaacaaatgatctggtttatttttatataatttgtttcgtgggctcaaacacataaatcagctgcttgtgttatatccagatctcttgtctttcctttcttcagagtatttatagttggaacaaatccatctcctttacctccctctcctccttcttctgttgtggattttctttttaaatgtttctcataggaaaataagtatttggaggcatccattttatttgctgaagttgaaattcaacccacttaaataaattatacttttttgacactcgcaaataaaatcataattgatgtcttcttgtaccctagcacattttttaaaacctgaaagttggccccttgtttcccattcttcaatccttcctatgaccttttcctctgtcgagttatctttctcatgtgcacatgggggagcttgtgagacactggtttgaatgcaccattctggtgacttttgcagaaatttgatcctaagtgatggattgaaatttcctgtcacatggaggaaaaaaaaaatggggatgaacagctacagggctgacggatttctctagggttcactgtctgatgcaaagtctgaggttatgtctcagaattctctctaaaatgagccacaagtgtgtgatatacagcacccgcttacacaggatactctagagccataaacattgggtgttgtggggagggctacctctgcaggtgagagacgtcaggtcagtctgacattttcattgagctgttattcagagaagtttcaagcacaaccccaatagtatcctcctgtagaaaggaaacaaaaaacctaaaacctcatcagaacattannnnnnnnnnnnnnnnnnnnnnnnnnnnnnnnnnnnnnnnnnnnnnnnnnnnnnnnnnnnnnnnnnnnnnnnnnnnnnnnnnnnnnnnnnnnnnnnnnnnnnnnnnnnnnnnnnnnnnnnnnnnnnnnnnnnnnnnnnnnnnnnnnnnnnnnnnnnnnnnnnnnnnnnnnnnnnnnnnnnnnnnnnnnnnnnnnnnnnnnnnnnnnnnnnnnnnnnnnnnnnnnnnnnnnnnnnnnnnnnnnnnnnnnnnnnnnnnnnnnnnnnnnnnnnnnnnnnnnnnnnnnnnnnnnnnnnnnnnnnnnnnnnnnnnnnnnnnnnnnnnnnnnnnnnnnnnnnnnnnnnnnnnnnnnnnnnnnnnnnnnnnnnnnnnnnnnnnnnnnnnnnnnnnnnnnnnnnnnnnnnnnnnnnnnnnnnnnnnnnnnnnnnnnnnnnnnnnnnnnnnnnnnnnnnnnnnnnnnnnnnnnnnnnnnnnnnnnnnnnnnnnnnnnnnnnaattggaaacaatcacccatggaaggagttacaggggaacgacagggccaagaagtgggagtgggtgggggagttttgggatagcattggaaatgtaaatgaaataaatacccaattaaaaaaaaagaaatattttgttattgcaagcttcaggctcactggtgactttctaggtattttgtactagcagtggcttgggattttcatttttgttttgatatttgggtgcagttgctaataaagctgtctttttctatgagaaaaaaaaggcaaatggttggacctggagggcatcatcctgagtgaggtaacacaatcacaaaagaactcaaatgatatgtactcactgataagtggatattagcccagaaacttagtatacccgagatataagagacatttgtaaaacacatgaaactgaagaagaatgaagaccaaagtgtggacactttgccccttcttagaatcaatcacccatggaaggagttacagagacaaagtttggagctgagacaaaaggatggaccatttagagactgccatatccagggatccatcccataattagcctccaaacaatgacaccattgcatacactagcaagcatttgctgaaaggaccctgatatagctgtctcttgtgagactaggccggggcctagcaaacacagaagtggatgctcacatattggatggagcacaggacccccagtggaggagctagagaaagtatccaaggagctaaagggatctgcaaccctataggtggaacaacaatatgaactaagcagtaccccggagctcttgactctagctgcacatgtatcaaaagatggcctagtcggccatcactggaaagagaggcacattggacaggcaaactttatatgccccagtacagggaatcgccagggccaaaaagtgggaatgggtaggtagggaagtgggggggagggtatgggggacttttgggatagacattggaaatgtaattgaggaaaatannnnnnnnnnnnnnnnnnnntaataatatatatatatatatatatatatatatatatatatatatatatatatatatataggagaaagaaagacaccaaaaaaaaaaaaaaaaaaaaaaaaaaaaaaaagaggagcctgaggctttgggaatctaattctgtttgccatttaagagaaatctatacataaaaatacaggataaaataaaatacaacttcatagtaccttggctgttttattatggactctctttgacttcaggttttggatggttataaacataaatgaacatataaaaagaactgcggcagccccattggcaagtggcaccatggatacttgagactacatacggatttgcataaatgtaatcagatcatccttcatggtgattcagagacaaaacatgccttcctcctcatggcagcctgtgtgtgccctcagagtttaggtctctgttcttcttttgtgtaatcagtttctcaattatatacttagtcctcatattttcaaccaccagctacatctcagtgttgagctactgtgataggctcaagcttgtgtgtcctgttggtcagtgaacatttcctacctggatgtggaagccaaatttaacaagccaaccaccaatttctctattgttctccacttgtctcctctgcttctctatcccaccctaaatctcactgactctccctcacctttttatttttgctttctgaggcatcatttcttggatgacagaggtttagacatttgggttcatcatctggttcctattctatcttatctcaggttcttccaagtgtaccacaaggcttgctgactccagaaaggactcaaaaactcagaaaagctttcacctaaagttgtgggcttttataacaaagatagatacagtttaaaaccagaaagggcaaaaccacatagatcatagttcaagagaaacatggcttcggttgccaaaagctccttcccagggatgttgagcagatagttttaattcttcaaggcacaggcaacagattgtcaggtttaggagctccctgtgccttggtgtgggactctcaacgggggcagttagatgggcatgcaccacatataggcattgctccaactactcagatttgatccccgttctcagaaagcaggcattctgcatctaccaggaatcgtgtaggcagcataaattacctgatcacactggtaccccaaggccttagtcacacaacacttagcagataaaaaagtttagagagctcagagagggtttattctttgatgctgttcaaattctaggcttgaagaaagatctttcttggaaatgtgtggtttgagcaatgtaagtttgcttagttaaccctactctatccacctgcataggagcatacaactaccaacttcatgaactatttggaaaagtgagaaagaatatgtagtatggtggttatcaaatgcatttgggttctaattctacgtgatttaagtgagatatggctgtcagaatgctggacacataagtacaaaaaataatgttaggcagcaatttcttattattatggtgttaccattgtatctttttctcttaaaataacttttaattatgtatatgcatgcaggtatagtcctgtgaatacatgtcctcacaggtcataggagggcattaaattccttataattagagttatagacagttgtcagatttctgatgttgcccttgggaaacaatcatgggtcttctgcaagggcagctgagctcttaaccactgagccacctatccagcccacaactgtgtgcatttttaatatagtactacatcatttcatcttctttgtgtattgattcccatgccagttggcctaggatgtgatactgcgttcataaacaagccgggctttgaatagttaacaagacttatagagaatgtcttgagactacttttctactgtgagctaactgtagctctcttccatatcatcattctgggttcaggctgaagaaacagtcccaagctgaaatactgaaatacacgattgaattcaacaatggcttctaaagctttggtgtgagatggtatatatcctgtttgttcccattttgtttccaaagtcccaattcctggtctggtgtcaatgcactaaggatgtatgatattcctttggagtgatggagcttgatgtttgaccaattataaaatatcccagcctcttactggcttatcaacagactccctctatttgtcccgttgatcatcaccaagcccaaagccttctgagctcagtggtggcaaactagttcccttctgtagtgccacgttctgggtagctccctttgaagctccagcactcttgcctttcccatattttagtgaccagactatttcaccagccctaggcatattttattttagcaaacctttttgcgatttctcttgtgatattaagtcactgagatggtggggcaatttctgaagagacttcttattttgagctttaagtcttcagagcccaaataccttacccatagcttcctgcctgaagcatcaagtgaatggaagaatgaatactgctatactgcttcagagagctccaagtgctgatcagtgacgatgggatgagagatcaagccaattcatgctttgttcacaaggcaagtccagagtgggatgtggtagaagggctatcctttgctaattcaccacaagctctgaacagttgcaacagtgcccttttcttaagggtctttggatgttcaaaggacatggtctacaaagggactgggtgtccccaaaggactatatttatggaaataatcacataggggggagattgctgctttggctctgatttcttgaaattgtcacattatgccctgagcccataagtcaccatccacctactccacattcttcagatgtatgtgactcatgacatcttcacaagagtgggcccgcagaactgctctgggctttgtaaaccggatctgtggacccgcctctttttctaaccaactttcatttatctctggtacagaacctctttttcctagagaaagtagctcttgaggccaaaaatatcagactggaaataaagatgaagaaaaaagtaaccagatcatctgtgctccataagatataaagcactggcttcatgaaaaaacaaaaagaaaaataaaagttcctaaaaataaaaacccaggcaacacagcaaacagacaaaatgacttctagtggttgaatggtttttaaggtatttccctcattacagacttcaaaaccgttccaaaagcagtctgtactaaattctgtgccaaaggggaatattgcccactggcaggctcaatagtcagaaatagacagccatgcacaagtgttttgattgccccaggcagcagggaaagaggattaccaaagcctgagaagtgcctcagtgtggaaggcaaaagcttagtcaagttcacttcagtaactttgagcaagcatcatgcctgcatgcactgctgtcaacaagctgaccctccagtttctggaagcaatgttttatttatgcttctattttgggcaaaggtgttcacaggacctgagggactaagccaagccaagcaaaatctgcatcgcttatagtactatactttggtactgagatgctggagaccaagtgacaataaccagaaagccactgaaaagttcacagagcaggcaaactttgtgattcttttgtgtagaatactggcgtattaaagtgctctaggcccagtggtccagacctatagtcccagctactctggaggctgagatgatataatttcaagcttaaggtctggttagagaatgagtgtgaagcctgcctgggcaatttagtgaagtagtcacaagaggttaaaagagggctggggatatggctcagtggcagagcacttgcctatgttcaaagccctagattcagtcatgagcaccacccctctaccacagagacaagcaaacaacaaataagcaagtctttggatagaaatggggatttgatgagttatgaaggcttatttacctcacacattggcaggaaatcactatagtctttcatgctgtggctggctagtgagatggtgtagtgtttgacacatttggggatcatcatgatcaccatgatgattgatcatgcttcatctttttgggttcctaaactgttcctagaatctccttatctctacttagccatcttgacccggaagacaaaaaccacagtcctgttctagggctctgggagcatctagaccccatttaaaagtctgagccctttctggggccaggacagagtatagcttactgttatcttcctttccaatattgtacttagagaaggcgtttccttctttgagcagctggtcctcctcagggataattttctccatctcatcctgtcctattggggaattaattttacttagcctttcccttcctgaatttatctctttctttctcagaataatgggaagtcactcatctatccattcaggggatttctgtgtcctcatggcttgtcatgatgcttttgactaagctgacaagttatttttcacctaggcctgaactggtcccctggtgcctgttgctaatgaacaacactgggtgagattgcacagctgacagctttctctcaattccatataaattctatttctttaaagtgtttaaagtaaaacaatccattgatgtaattcatggcaggtttgtgctaaagggtcagctactgatgtctgtttgcttatttattctcagctgttttgagtaccaactggtactggacactgcttgatgctgggggacagcagtgaagtcaaggtcattacagtctttgactttatagtggttaaaatactttcaatctaatgagggatagagaagtaaccagacggctacactatgttgagaccagagctttggtggggaagcacacagaggtagaagaatagcaattctttgctttcatggttcaaaactgaacttacggttaattaactcagtggacattgtctttgccatagtgaacgttgttcctggggacccctgtactggatgaatgagcacatacatgtgaagatgtgatattcttataaaggaaagcatgaagtgtgatgagcatgggcatgaggtccactggggatgcgactttgattggttgttgaaaggacattaggctaagagttgagatgtgggtgagagttgggtaataaagaggagggatagagctggctccagaaaagacatttcgttggtttttgaggtcaagaagggcattaaggctcagaggagagtgcttgatagtgctctgtcactggttgtaataaggggcacaagggaaggaagggtagggacagtcctgttgtaaggagtttgctcagccactggaaatagttttgaccttatcttgaggaagatgggggagctatggaaagagtttggtcatggaagatccttagaactttattatggtaaaactaatggcttgacatgcaggcatgtgtggtgtgaaagcagtatcaaaatgatctaggggaaccaaggtgtttagtaagtataggtcaggtaagagtagtgttggggagaaatatactcaaagtacatcctatgacatagaacaactccgtgccatcacttttcttctctgcccttgcttcttatttccctaaactgggggtgagaataatgacctctcacaggctgctgtgggctagtcactgtgaaatccttggtagttataccatgaaatatttttcatagtctgttcttccttccaaaggtttatggttggggatggaggtgagtctggtagaggtagaaaactgttctcattgaaaaccctgggaccttgtagtcagtccagatgttttgaaaaaagagatacctcttgactgcattaacctaaaaatagcatggccctttaggtggctacactttaaataatagccttgcatgttaaaagctcaataagtattatgctattaattgctgtatggatgaacaaatttttgaaattttctatgcccaattttctaatcatgaaagataataatggttcctacacacttaagttggtgattaggtctatatctatatttatatatgcaacgtatcagtggctggtacaaattagctatgttccgggttctgggctgaagtttagaagaaagatagatattatccctgtcctcatggaagaaacaaaaatttaccctggtgagtaaccaaactgatgcctaagaaatgaagtggatggaggaagctaaagagtttataaataaatggataagacccgaggagatggatggttaggagaaggggaggtctcagttcctagctatatcctgagaatgaatcagtattcctagttgactttacataaggtgtcagacatgctcagcaataagataagatgcacagcaatgcatctagaattgattgggctcactaaaaatgaggaaaagggatatttagtttatcttaacttgtaactttctggatttattatgtgagtttttgaggtagcaaatgaagtctgcaccccagcttattaaaggcatccaaatattggatttggcttatcatatttaaaaagccttgaaacaatgccccaatgatctgtggagaagaaacagaactggccatacccccaagtgtttttcttgcttcatcctgtttaattctgatgccattgtaaggcagctaagcttcccctgtggttaaggaaagcattgtcaaaagccagaggcagtgcaatactcaggagtgcttccattcctttaggaagattctcagtctggattcttagtcagagcttttgctgagctttaaaggactctaggcctttctttgatctgcttctgagcatctctactcttttccttctttatccggagcccagaggcactggacactgcagaaagcaccaatcctatttgcccctcttttcttcttgccttcttcctaataacacaaagtgtcaacacacatagcagagaaggtgctgaacactaatacagacagttagaggtgctctgccgtcgcctcactgcaggatctgggtggtctgtgtctggggggtctggggctttgattttgtttttgaactgaaggttgatgtttagcagtgttatctaggcaatcaacaatctgggatcttttaaagcctatggtagtgagaatagtggctcccaaagatgtagataacttgatcccttgaccgtgtggataagttacattatacctggtaagtaagaaaaaaggttgaagatggaattaaggttgttaatcagatgagatgtgggggattactctggactatcagtatggctcagcaacctcataaaggaccctcaaatgggaaagggggatgattaagtgtcagcacacaatgtcacatggggtacttaatcagtaaagctgatttttaagttggaaatagctggctatgaacccgggactcaaacatagctctagagcctggagcagggacaaaaccagacttttacctcgagccttcagatgagactgcaccttcagaaaagtccatatttagtttaagcaggtaagatgtggttctggtcttctgaatacacagctgcaggataagtctgtaagtctttaagttcctccaatttgtggtcattccttaaagaggcaatgggaaacgaagataggagctttacaaagaagtagatgattgcaaacggtaagaatctaccgaacatttggtttatatttgtaaaggaaaatattggaaactattttgtgtatcttagtatcacaacaaactgatcaagccctatgaaggtagtatcaatgaaggagactggcctagtagacaagaatggggactggaggggagtagggaagatgaggggaatatagtcagggggagaatatagaggaatgcagtgtggcagactatggggatatggccaggctggggaggagaatagagtataacagaccaaaagtgacaaggccagtggggatgttggcattaagccccaggtgattggagcaaagatgagtatgcttgttaggtatcctcccattttcaaatgaaatctgagttttaggatttcaatgaaacttaccctagtactttactctagaccatttgaatactactcagccaacagccaatcaaataaatcctatgtctaaacctcaagtacaacgggatggatgtttagcccatgagcccctatcttcagattggtaatccagccctatagtcagccagagagatgtgtcatccttacatttctgagtaacaccccccaccccccagattcttttagacagcaagaaactaatttaaggatgttcatcattgaactagtcaatggtaagcatcaggttttaagccatggtatgcctgattttaaaagccaggattttgttgttgttattgtcatactttttttcttcctgtcttactgcctctaaggaaatgatgaatagcagtggggctgtaagtggggaaatggaagaaatataattaatatttgtcaggcacacattatagtccaggcactaggtcaaagattttctatatgtaacttaaatatcacatcaatgatataaggtaaggaacattcttatttttagctaagaaattggatcagaaaaagtcagataaatcatacttggtcacacaggtgagacgtgtgcaggaagcacaacctcagatttttctcctggttgtgtgtattagcagaagtaaagtagccatgcttcctttgaagcaagaatgaaatatttaggactacttggttatgccaggcttacacagtaggggcatctcagagtttcttttgctgagacaaaataccatgaccaaaaacaacctgaagaggagaggatttatttatcttacacttccggaacagccttcctctgagggaagtcacagaaggacctcaagcagggcaggaaccttgaggcagggactgaagcagaaaccgtagaagaatattacttattggcttgcacagctggctctttgtatacaacccagaaacacctgcccagaactgccactacccacaaggagttgggcccttctacatcaattattaacccagaaaattccccacaggcctgccaacaggccgatcttatggatatattttcttaaagactcccgcatcccagatatgtttagctttgtttaaagttgcctaaaaacaagcagcatggggggcttagctagcagggctgtcgcgggcatccagaagcacacttataaggaggaagtgggtcacactatctactgtagaagagaaggagccagtcaccagagaaaccagtataagagatcaagacatgatatgcaaattgtctgtgaacgatgataaaggccaccagattataagatttgctttgagctgaataagtgtacatgcccttggctcttactcagtgtcacttacaggttgtgttcagagagaagcttagtggccaaggactggtgtaagttgaaagtctaagaaatatggtaattcaacttcattagtcaccagaaatgcacatagcatttacagtcttacatcgatagctctccacttttaccagaatagcgaaaaggaaaggaggacaataccacatgttgttgagaatgtggagtagtcagaacatctgccagctgttggcatggatattagttgctagattgacaatggaaaactcttcttagtatctatgaatattaaacacatggaagagcttataaattagtaattctgttcctagggagaaatgtgtatatctgtacaccagaagatatgcaaaagtgctcatctttgagtatcagacaaatatggcaatatttgtaatagaaaagagaaaacaaagaatgacttaatgatgtatttatagcaattaaacacaaaatcaagactgacctggtcaagcactatagggatgaatcttgtaaataaggttggcagagaagctgcaatcaaaggtgaaaacaagtatgattttattcatagaaaaaatgtagtctcaaacctttggtgttacaggccaggatgatggttgacttccaggatggcagacagaaaatgttctcattctcagtattttgtcatctatgtgcagtagccatttggaaatatacccacatatgcacatgcctgtatgtggttgaatagagaagaatgagaagaatgagaagaaaagaacaggcctgggagggagtgtatgatatgacagatcactggggaagttgctggtgaagatagctgtgagaactgaacatggccctgactatatggatagggaagggctgagggaagttagagacgtcaaggttgcagaaatagagggtaactatgagaggcagtcagacagtaacttcttgttctgacaaacgctgctaatagttccctctgcgtctgtctctctggaactcagacaactcagtttgggatccttgtctttggaaggattttttttcttatgaatcaaaaacagtaaagactgttcttaaaggatcatttccaagattgctttccaaatgtcattggtgatcaagcctcacaaccgttgtgcacgaggaggatggaaattaagttcaagcttgagttctctttcctttttctgcttctctatcaccaatgttgatctgtcttcttgcctttccttatatattgcttatctgcctcagatttcatgaagatagtttctaggctatttcacgtaagagtttccttcagtccaaactgttgcattggatgcagccaaggacatgtttttaagacactcataatgagttacaattaaagtttgctatgtgctattacagggcacatagcaaagagactgtataattcaacatgcaaatcaagacattttgcaaataacaaatgatgttgttaataattactctagggtacttactgtcttgggcagatagcaatatatggcaactctacctagagcctcctaggtgggaattggtcttaggaaagctctgctctggaagttgctttcccacttgccctctaggcattaagatatccttcctagaatggaccctgcaggagactgttaagtcaagactttatagggatagtaattgaacaaaatggacccaacactagaaactagaggcataaatcttgatgataaaattcatccaaagatatagaaggttgggctctaggtaccactttctggttcttctctagtaaaagcctgtgagaggttgacaagataactcaatgggtaaagactttctgcctaagcttggtgccctgtctttaattcctgcaacctacttacatttaggtggaagtagaggtcacgatcacattgtcgtctgacatccacaagagtgttgtggtatattatgcactcaaatacacaataataagtaaaataataatgataatttgatgaaaagctacaagtgaccagttcttttctttttttcttatttcctgtctttttttaattagatattttctttatttacatttcaaatgttatcccctttactagtttcccctcccaaaaacccccatccctcccccctccacccccgctcaccaacccacccactcccacttcttggccctggaagtttcctatactggggcatagaaccttcacaggaccaggggcctctcctcccatttatgaccaactaggccatcctctgatacacatgcagctagagccatgagtgcctccatgtgttttctttggttggtagtttattttcatggagctctggagatactggttagttaatattgttggtcctcctatggggctgcaaatctcttcgattccctgggtctttctctagctccttcattggggaccctgtgctccatccaacgaatggctgtgagcatctactcctgtatttgtcaggcactggcagggcttctcaggaaacagctatatcaggctcctgtcagcaggctcttgttggcatccacaatagtgtctggttttgatggttgtctatgggatgcatccccaggtggagcagcctctagatggtcattccttcagtctctgcttcacactttgtctctgtaactccttccatgggtattttgttcccccttctaagaaggattaaagtatccacactttggccttccttcttcttgagtttcatgtgttttgcaaattgtatcttgggtactctgagcttctgggctaatatccacatatcagtgagtgcctatcatgtgtgttcttttgtgactgggttacctcactcaggatgatatcctccagatccatccatttgtctaagaatttcgtaaagtcattgtttttagtagctgagtagtactccattgtgtaaatgtaccacattttctgtatccattcctccattgagggacatctatgttctttttagtttctgggtattataaataaggctgctataaacgaagtaaagcatgtgtccttattacacattggaacatcttctgggtaaatgcccaggagtggtatagctgagtctttagttagtaccaggtccaattttatgaggaactgccaactgatttccagagtggttgtaccagcttgcaatcccaccagcaatggaggagtgtttctctttctccacatcctcaccagcatcttctgttacctgagtttttgatcttagccattctgactggtgtgaggtggaatctcagggttgttttgatttctatttccctgatgactaaggatgttgaacattttctttttctttttcttctttcctttcctttcctttcctttcctttcctttcctttcctttcctttcctttcctttcctttcctttccttcccttcccttcccttcccttcccttcccttcccttcccttctcttctcttttcttttcttttcttttcttttcttttcttttcttttcttttcttttcttttcttttcttttctcttcccttcccttcccttcccttcacttnnnnnnnnnnnnnnnnnnnncccttcccttcccttcccttcccttcccttcccttcccttcccttcccttcccttcccttctcttctcttctcttctcttttcttttcttttcttttcttttcttttcttttcttttcttttcttttcttttcttttcttttcttttcttgatgcttcccagccattcggtattcctcagttgagaattctttgtttagctctgtgccccatttttaaatagggttatttggttttctggaatctaactttttgagttcttcatatatattggatattaaccctctattggatttaggattggtaaagatctttttcccaatctgttagttgccttttttgtcttattgaccatgaccagtggccatttctaacacagattctgttcatgtctggtctgatttttcttctcttccctgttggctttttaaattcactttctttactcctagtcttacatgatctttgtcccatcctggtctgttctggagtaggactttgtttcccagggtctcatggttgagtaggtaatctcagtctcactagcctagggcttttgtttgtatctctagcagcaaatgtaagcagtagcttgatctaggttacagtgtgatttgtactgcttgcttcaggctaggcttctctctgcaactctgttctgtcttgctcagctatgtgctgttcgcctcctgctgggctctctgtattctgttcagttctgtctctgtattctgttctctgacatacaaggtgctgggaatcctaggtgtttagtcacccgctcatcttcctgtgggttctgaactaatggggaagtcagaagagcatcgtgggctgccttggggtgtagtacccactgcgctctctccattttctcccctccctgtattccagcaccaccaaaagcagcagggccaacccaggggccgtagggagtggaccaaggatcccttgcgctctcagattggtggtcagagtggaaggaagtgtgagatgaaggtagcagcaggaatacctagaagggaaaggggggaaaaggcataggaaaaaaaaaagaggagtgtggggcagcgtagaaaaaaaggagggagggagaaagagagcactgtaaacaatggagacttgctgcctgctgagatatgataagcttaactttgtttcttttccaaaaagcgaacatttcccttccgttcctgtagcaggaagcaagtggcctctacaatcagtgagagcaactccttatcagtggcagcaggtgctggcggtgaccccacatcatcgccttcccaccatttcctttctctcccctgacacccctgacataggaccccatattacccatagaaccttgccatgtaacgcggagcccgcaccggacagaacgttcccactcagtctttcactcagtgttctacaggccacgggaccatcctggataacccgtaatgcctctctgagaaaggtgaagccacggccctgtcaccagtcaggtgcagagtgtgagcccccagtcctcagaagagctccctgctcttggtatttacataaggaaaattttattgtcctgtgctcattctggagtagagatcatttcatgtgcatgctgcctctaccagttttgaaatatttgtagcttggggaaaaaaaaatcaaaactgacttaagattaaaaaaaacaaaacaaaacatcaggtggacaaaatgaatctctttctccatcatactccctttatactcattatctatatgcccctccccccaaaccttccagcaaggacataagtaatttaaaagcacctctagagaggtaggggatggctctttctcattatagggcagggcaggcctactaattttcctaagtggaagcacagggtcatgtcaggggctggaggcttgactctactcatccttcctacagagtcaaagggcacttgacatgtatttccaatgggccaggagaaaaccaatttggtgttaagtgtttagccttcagatttaaatagcatggaagactgtaaggatgaacacactgaaccagggcatcaggcctcccactgaacagccaggtcatctagctcccaaaaaggagagggaacaagacatttaacccgagacagaacagaagaaatgacaggtcagaaagactgggacagcatgttgaaactaacattctgttcagataatgggagggatggtctggggagcgttatttagctagtgagggaaagagaatatatattttaagcactttattcagtataagcatatgtcaacacagaaatttttatcaattatttttatcacccagcaaatgaggaattgattttctacatgttttgtatctctactgctctgggaggcatgcgctgtaggacacaacgatcttagagattaaaatgagtgcttgaggcttagatttccttttcacctctcttgttcttatatgatgctcatcaagtttccctttttcaagagattaaaaaacccaatagtcaataacaacaacaaaaaaacaagctttcatgttgttttttttaaatctcttatcttgtcagagacatccccttggtttaatttcatagaactttttttttttttttccaagacagggtttctctgtatagccctgactatcctggaactcactttgtagaccaggctggcctcgaactcagaaatcagcctgcctctgcctcccgagtgctgggattaaaggtgtgggattaaacatgtttattttgtcaagtaaagtctgcttcctgggctgtgtgcttgcatagattcatgaatgcagatcactcactgaacaagtagattgggcttcaggcacgagtagaggtagaaaggcagatatagtcagctagctgagctgcttgctgtattgggagcctgtgttaacgccaagggggaactggcaccttttcctgttttacacaaagatgatcaaagagccagcaagtagctggttgctcctaagacctttggtcctatgatcagcttgggctatgactggtacactgcttcatgtacttacctagtttataaatggcagtctgagaattttacaacttagtaggaacacgctatactttacctgagtacctcatgcatgaagggacagcaatggtcatcactagaagttatcttttatataccctgctcttttacccttttgcatgttttaaggttatactttaaggaaaatgtacatcacattgtttggtatttcacaaataaacataaagatcttagacctataggccccttaagtctaagtaaggggaaaggcattcatagggcagggattgtgtgtctcaggactttggggctccttgactacgtaggtcctcacgttcttggtgctgttttggtgcagggcaagagaaaatgatgctaagatgcagagttttagacgtggccacattctttggtaccctgagctacttaaggctgtgcttgattccattaatctgaagaatagaaaaattagaagctctaaaatctaagcacgcgtgttgcctgcaggcctactgtgtaacttggtcatttgggaaaacttgatcctttagcatcaaagacatcttgggtgcactgggaaggccattatcgtctactaatgattcaaagagggggggatcagtcctccatagggaagggccgttacgtagtctgagtgcatttttttctttttcctcaagaaaagcaagtacaagcctggtagtagtggcacaagcctttaattccagcacttgggaaacagcaaggtggatctttgtgagtctgaggtcagcctggtctacagagttagttccacagaaagaccctgtctcaaaaaactaagaaagtgtaaagctccagggtcctttggactttttaaaagagaaggtgaaaatatactaattaatcaatattaagatacaactcaaatgtttaaaaatggctacagcaacagcattgcaaaacaccttcttgttatattccaaggtgaggaaatgatattctttagtggtttagtgttagttacctcttctctagcatttctctctcnnnnnnnnnnnnnnnnnnnnnnnnnnnnnnnnnnnnnnnnnnnnnnnnnccctccctctgtgtgtatgtgtgtgcgtgtgcgtgcatatttgtgtattcttcagatatgcatttctacatcataacacctgaggatcccttctctaactgtgatcacttcacccttctgtcgttgcagcagagactagctacatcacttcgacagtgtacaatagccccagttttgggttatttcaaaatctccctaagcaaaacttcactgtgtggcccttggtgggttaactaaagggtttgggattgccattgaagagcagaaagggaagggatttcatgtttctgcttttttttggaggggggagggctcttcggtgaatgctaagtttaaatattgggtcctgtgaaatggtgtgctttcatatgaagacatgagaaccttcttcatagaagagccacctattccagtgactgtgtgccaatggtctctgccaagttgaaagcgtgtttaggcaagttttaatcaagctggcatctcacagaaatggcaaatgtatggttcataaaggttttgttttgttttgtttttgttttgcttaagaaaaaaatgacattttactgattgtatgcaagaaaaccttttaaagttttacaaacttctattagtgttagaatgaaacatgttacaaagttttacagtactttataatagcatttaatgctttatatttcacattgtattttgattcaaagaatacactagttcccaatagagctggtactttctccaggaccttgctgaagaggttacataagatcccatggagttgccagatcattagtgatgaagttctcagtttctcctcttcacacttcccttcctttcccatagaggaattgacagttgttgactggtagatcctggcttggctaacacttgtctctgacagagtgagtctttaggaactggtagggaactggtgcccttcctgactggttaagtgtttgtagtaggtgtgttttgggtagcagcaaatctgagcactggcacctgacgagagcctggaaatctggggttccctgttcagaactcaggaagatgttcctgatggaacaacgaagtagagttctgagcagttctgcctggtgcttggggcagtacttcccagatccaagttactgccatttccctatgtaataccactggattcagagcgagtctcagccttgaagaatgtagttccccttgagctgcctctgtcttccttcttttttctctggccctttctttcccttacctgggctaagctctttgtctcttcagcttcctcgttggctttctctgaggtcttcttaagggaggtctcttttgctgtccttggtctcagtggatcctaacactcccctttgtcttcctagaagccccgatatgatctaatcttgtatctgtttctcatcagaacataaactttgggagagtagaatctttaaccccttacattttggctactttattgggttctttcgcccaaaatccttctccaccccaatcccttccaatttccccaacccaaagtgagcaaggtaagaaaaaggttagagggggaaggggggcatacaactctttagactacttcctgctgattaggggtgtcagagttcctaggggcacgtttgatctttgttgtcaggatatctccaatcagcaatccagccaacaacaaaagcaacaaaatagcgaaagcaggaaccagcagccgcaggaaccagcagcagctgggacaagaggcaacagggaccagcagctgctaaggtagcagtgggggcagtagcagggggagcagccgcttctgcagcctctccaggttctggcatttatatactgtctcaagaatcttccagaattctaaacgtcaactgttcagctggcagagtgatgcccttgccagagcacgaggcaaatcatagtcagctgctgtagacagtctgaagcagccccatatcccgcacctgggagtaaaacacaaacctatttacataacataatgggttttttaagaaaccaagatttttagtatgttttctcagttgtctggggctgaggatctggcccagactgtaaactcaacacatgagcatgagggcccgagtttgatccccagcacgcttctgggaggaaagcaggggcaatggcaatcgtctgtaaatgttatatgttcgctcttatttctggatcctagctctggatctttacatgtgagtctatcacctagaagaaaagatgataccagaaaagtaaaaagtagccatgggtcccgaagaggaggagctctaggggagggaactagtagggcaaagttgctataaagtgggaaataagaaagggggaagggaggtttacctagggaaaggggaaggagggaaacacagatggacagaaggacaagaaaggagaaagagaaatggcacaaagaatgtttgaaaatgccatagagaaccatattattttatgtttactaaattgcatgcatgtaagtatatgtgtatatctgtatgtatttccatgcatgttatatgtgtgtgtattaaaagttatgtacttgggatgacattgttttccacaaatccatagactatcaaataaaaaatccagtaccaggcatggaaaacctctttccaagttgttggtcagaagagtccaagagacttcctctaattgtgattttgttcttaatctatttttgcaacagtgtttgaatatatatatatatatatatataacttgatatatatatatataacttgatatatatatcacttgatatatatatctatatatatattattgatttactgatcagtgcatcaatcccttagtctactgaatgtttattgagaatgtactatgctatgctaacgactgtgtggcatgggctggcgggactaccatcatcccttgtttacctggccccagaaatgggtacatttctgtgctctcaagtgctcttgaggctcatccacactggtaggtccttagagagccttcgagatcatgctttgagaatgtctaacactgggaatagtgatgttaactacgacattataagccgattaggactttatagtctatttcctaaagtaagttttactttacagtcatggagtcatgagcatctcccttggcaactcttcatttattctctagccatggctctgatatgggagacttgaagtagcagcagcactgataccaatctgctctggcttctgttcccgtgagatgggtaaaggagacccagtgtaatacgacctatgcatagaagtcctcaggcttaggtgcgtgagacacttaggctctatcttctactcctggccccttggcgccgcctgctttttagtatttccctgactacaaggattcccttccactgccacagtttctctgtgggtggtgggttttttttcccctctgcactattatatcataaaaggcaaatcctctaaatggagattgggagttacttaaataaaaaataaataaagctctctgttagctttccccagaactgaatagatatcagttgaatgtaaaaattctctatagttttttttctttctttccaattagtgttttcagcacaaagcttattcagggtgattctaccctgctcaaatctgaatttggggcttttggttcctcagggtttccatggctttgtttatgaagaaaaaaaaatgagatgggcattttttttttttttagtacttggcttcaaagacagccaactcttcttcatttggttttcatgtgaacattctcagctgtttcttacactgttttcttcttgctctcaggtcccagataaaacctccagtgagaggagacctgtcccctagcaacaaatcacacacacgtttgctggcaacaacagtccgctcaccacctgccctcaaatgaactaaaggaatttaccaaagctcgagagggagagagtgaggagagcctgtcttgtaaggtgaggagatatgtgactagaaacctgagacactgtgtgtgtgtttgtgtggtgtgtgcgcgagcgcacaggtgagcaggtgagcaaggaagaaggaaggtgggaaagatgagtgattgcttaccaaaggttccacagtggtgggcaacgtgagctgacttggaagaaaggccatggaatattttataagatttatttgactcacaagattgttcttgaaaaaggcttggaggagtgtttgcagaataaacacttttccttctggttggtacagtaagagggggccgggannnnnnnnnnnnnnnnnnnngggccgggaatagggtgttccgtgcttttgccttgttctgatattttagaggaagtcagcaatggattgcttttaagacttctgacttttgaagtgcgtttctcagttttaatagtagtctgcttaggctgaattggcaatcagtctggagttctgtctttccttgtgtgtctgctgtaactggcttccctcctggaagaagacatgtgctctgtgtcagcagttaaaccagaaacagaggggaggtttcactcttggatccccaggtagcatgtggccaattaacgtcttcttttaaattttctatttattgtgtgggggaggaagactgggaagagatgggggaaggtgaaactaaggttgggatgtaaattaaataagtatttaattaataaaaattctatttatttgtgtttctctctctgtgtgtatctgtacacacagagatacacacacacacacacacacacacacacatgctgtggcacacaagaggtttggtcagagagcaaggttagggtaggttattacgttccaccttggctgagacagggtcctttaaaaatgctgctaaatatgacactagctggcctgaaagcctccagggactcttatttccacctcatcttgaagcaggagcattggttttatagacattctaccaatagctctgtgcgttgtggtgatacaaactcgagtcctcacgcttgtgccacaagtgctccactcactaagccatctctccagacctcagctgaaaccttttgattcattggctctggctcagtggttcctgactccagacacccccaaaggagaccacaaacctatgaattactgcttgtggctctatagtaagattactgagtattttacccagtgccatcatatgtatcatctttgctagtgtttcacttcattcatttatctccttaaaataactttgttgttttttttaaatgtttttattgaatttattattgtgtatctgtggtgtgtgtgtgtgtgtgtgtgtgtgtctatggtgtgtctatggtgtatctatggatctgtgttgaagtcagaggacatcatgctctgattatagttacttcttttcctttaactatgtgggtttcaaagatggaattgaggtagtcaggtttggtgacaagcactttaatcttgctgtgctgtcttcatggtccagacaattatttcttactgatttaaatcaagcacaagatgttcatatagttcactatttcatattacatctcaaaattgaaatggaattaaacttgatattaaatagaatacaaaaccaattcctaggttttatcatagtgtgctggcattttacttgaataaattatgtggccggtagacaattgaggccttatgtggcaggtctgggctaccatgctgatgtaggctgggaaagctgtccattgcccctgaagaacagtttgccagggatagcactcagtattgtcgtctaatgaatacactaatagaacgaaatgctttcttgggttatcaaaactccataatgtgcctgatacagacaactaaaacagggtcatttatcagtggctccgacatcattccatgctgatgaaaggattcaaaagccaaatgcagtcatcagcaaattctagagcagtagaagctatagaacagtggttctcaacccatgggtcatgaagcttctgggtgtccaatgacccttgcacagaggccacatatcagatatcctatgtacttacattataactcataacagtagcaaaattacaattaggcagtaggaacaaaaaaataacatagttgagggtcatcacagtatgaggaactgcattaaagagctgcagggttaggagagttgagaaccactgctatagaaagataaagaaagaagaattgatgggtattcacagttttcttctgcactgcctggaaatgagtagtgtggtaacccagctgaccttagtgagttgttcatcttattcgaagctggaaggccacgttcattgctccttgaccctcactcctacccatgcatcctggaatagcattcccatgtagatggggagtaggcaaagcagtgtcttggagcagcgtgggagccgatgtgtaagctccgttgccagactacttggcttggatccccacctgagcacatagtcaccaaacatatcactgctgaactctcagtgccctggctggggctttggtttctaagacagagatggtaagatgtactatctcacagagctgtgaagagtatttgaaattatacatacttaatgctcaggatactgcagctatgaataatcaaagcagtgtgtcctgaaatactacacataagtaataaacaggtgagtgaaaatgtatatgattggccacttgggaaggacttgccaagaaggatgaaggaaaagatatttctattccttttaatgctattgttattgaggttatcatggaaaggaggggttataaatcttttcttttttctttttgtttacttttgtttcattttatttgatgtattgcatgagtttagtatatttattttttattacagtcaacatattgcttttgttagaatatttatttatttatttattttattagatattttctttaaatacatttcaaatgctatcccgaaagttccctataccctcccctgccctgttcccctacccacccactcccgcttcttggccctggcattcccctgtactggtgtgtataaagtttgcaataccaaggggcctctcttcccctcttctctcttatcttctgctacatatgcagctagagacatgagctctggggattctggttagttcatattgttgtcccacctataggattgcagaccccttcagctccttggatgcgttctctagcttctccattgggagccgtgttccatcttatagatgactgtgagcatccacttctgtatttgccaggtactggcatagcctcatacaagacagctataacagggttccttcagcaaaatctttctggcatatgcaatagtgtctgggtttggtggttgattatgggatggatccccaggtggggtagtctctggattgtccatcctttcgtcttagctccaaactttgtctctaactcctttcatgggtattttgttctctattctaaggaggaatgaagtatccacccattggtcttccctctttttgattttcttgtgttttgcaaattgtatcttgggtgttctatgtttctgggctaatatccacgtatcagtgagtgcatatctaatgacttcttttgtgattgggttacctcactaaggatgatatcctccagatacatccatttgctcaagaatttcataaatccattgtttttaatagctgagtagtactctattgtgtaaatgtaccacattttctatatccattcctctgttgaggggcatctgggttctttccagcttctggctattataaataaggctgctatgaacatagtggagcatgtgttcttattacctgttggaacttctgggtatatgcccaggagaggtattgctggatcttccagtagtagtatgttcaattttctgaggaacctccagactgacttccagagtggttgtacaagcttgcagtcccaccaacaatggaggagtgttcctctttctccacatccttgccagcatctgctgtcacctggatttttgatcttagtcattctgactggtgtgaggtggaatgtcaaggttgttttgatttgcatttccctgatgattaaggatgttgaacattttttcaggtgcttctcagccattccatattcctcagttgtgaattctttgtttagctctgaatcccagtttttaatggggttatttgaatttctggagtccagcttcttgagctctttgtatatattggatattagtcccctatcagatttaggattggtaaaaatcctttcccaatctgttggtgacctttttgtcttattgatagtgtcttttgccttacagaagctttgcaattttatgaggtcccatttgtcaattcttgatcttacagcacaagccattgctgttctgtttaggaatttttcccctgtacccatatctttgaggctttaccctactttctcctattaatttcagtgtctttggtcttatgtggaggtctttgatccacttagacttgagctttgttcaaggagataagaatggatcaattcgcattcttctacaggatagctgccagttgtgccagcaccatttgttgaaaatgctgtctttttttccactggatgtttttagataggagaggatatatttttgtatatgctagatatccttctctatgcacatatgtggtaagctaagcaatccaaacgctctcatcttctgatatttgtgtttaccagatgtttctgttctcatctcagcagcaccgagaagtcaagagccaggagtctaagacaaattttaagttcaaaggtatatcagattgtatgctctgagatgtaattggcttggcattaaaataatataggaattggctgtgaatcccaggtgatataattttttaatgaattcaaaccgcagctaaaggaaaggtggatgcacagatgagtggatgtgaaagggtgccatggcagagattattcataataggtattaaaagagcaatagtgaatttttaaaaataaagatgaactcagcaaataaaccatgcagtttaaaaaatgaattcaccactcagtttgattctgcattcataaatgtaatgaagttccaacaagcattttgcagtggaaatgtctgaggggagccttctaatacaaattatgctccattgagccaggaacatgaggaagtactagttttagggccctatggtcaatagagcatagctccacctttgattccagttcttctcctactcgtctcttctctccttattagtattgctgagacacatctgtctcccaggacccttccctcaccctgactgccttatatcccatagggaagaaaccctgctctgtgaaatcctgttctttcctctcgctctctgccagaggacaccttttctttgtcaaggtcatgctctccaaacctgtaaaagcatctctggtgagtgtgtggcactggaactttagctgtgtttatggatgtgggtgttcatttccatagctgtgtgccagcagaacagcaatgtgaggggactcaagagacactgacaacctggcaaacactacatcttaacatgctaactccttggctccttgtctttctcagccacaggaccctgagtgttgtcaacgttagtcacatgagtccagaatgtcacacaaagtgaagcaaatgtaatgtgagttattaataccaacatacttcactcacttgtatttcattacttcatttatttcttattattttcaccagtaaataagccatatatgtgtgtgtgtgtgtatacatatatgtgtgtgtgtgtgtgtgtgtgtgtgtgtgtgtgtgtatttctttttgagacaattttgctacatactcgagactagcctcagacttcctatgtagatgcagactaggtttacgttaaactctttctcccacagcctaccttgtgttggaattaaaagtgtttgtccctcatgcctgccaagaaaatgccagtgtctggcaaatacagaagtggatgctcacagtcatctattggatggagcacaggacccccaatggaggagctagagaaaaatgatttttttaaagtagaggaaaaaaatgaaagaacattagaaatttcccaaagggtaagcagaaattagaagtcatgcagatggtacaaggaaactaatttttatttttgatagacattgaactagcagtattcataaaaacaccattttggcatctctcaaaatttataaaattatttaaaaataggcaatgtacacaaaacagtgtgcatttttaagacaatacaaggtaggaaaatggtaattaaagaaaagcaagtgcaatcttaattaggtaaaatgttatacattcatcctgataacaaaaggccccaggttattttgagcctacttcatcagcatgccagtggagatggaactaccttggatgcattcgtgagaacactgttaatattaatgggagcctagtgctcaagattctcaactgataagaaggtagctagcagctgtgacaagctgctctgaagactcctgatctgctagttacaggtatgtgggacgtctctctactctctccgctcactcttagcccttctcctgagaactctcttcactcataagttgtggaaaggtaggatggtggaacaaacatttttcaatttcttaagagttagaacctgactagaattcctgatgaatgtaaaaggaagtaagagattaaaagctgctcctgcccgctctagaacagtcctctgcatctggccacattctggaaactcagcgttagcttgaattccaaggagtcaaggcaatagttctttgactgagaggtttacatggctgccagccaggagacttcggatagagtcgactctcaccatctggctagtccagttgtggaacacttagcctagttggcagttcaaagatttcccaggctcaagatggctggatagagatggccagtcttcctctccttaccagagaagaaatgataatttcaaatttgtatgtcctttttaaggtgagtgactatgggagaatgctggaaatggggccagggcagggcaagaggaagagacggagagattaactataacctaggaagcttcagagacctgggaaaatagcttagttagagaaacaagactcttgacagccatggaaggagaaatcccccattgcatgggtaagggtcaagaaacatcctggtatcagtacagatgctgggtatcccagctgttagcagtttcacaatctgcttgggacttgtaacccagttacataaaaatcctggtatctgcatagtagctatgctttgggataggatctcatgttatcacttaggaaatccccatgtgctatagccaggagtcatctgagatctgaactattatccccttctttgggattctaaaaacatttccctacatgggtttgaggggctggggacctgctttgtggactcggcttggttcagcagaatgccaatgaggccaccaagtgttctgctctgtagggaagagagttgtggcatagatgggagaggaaggcatcaacctcaaggctcaagtgggtagaatagttgccctctgagaccagtgatgaggccatatatgtgtgtggacttgtttctccgcaagtctgtaaacaagtcccatgcagttcttgccacctttgcactacataagcatctgttactgacacagtgaagacataacactggtcctactgcatgcttgcctttgggaacatgatgaggtaattttgagcaactctaatgctctagccattatccttcccccaggtttgcatgacgttggtaggagtggaggtcggggcagcataaggttctgctcctaggagatccgcactgtcgaaacagtacagaaagacaccagattcctgatgccacttcacctgtgttgttctcactgccccctcttctttgtgatgtccacatgcctttagtgatgggaaacggccatcttgtttgtattgccatgaacatgacatagacatctgtctacagatgcttggtaaagaagtcttggctctggctgccatcctacaaccagaaatgtgcagctgagagagaattctagttagaactgccatccctccaggacatccctccaaagtaaggtccagaggaacttagtctaggacaaagtcccactcctgattgtgaaccgataatggcagagaggagcatagtggttcctggttcctagtatcattccaccttcctgactcaagctacttcctactcccctgctgtgtctgatagggcattgatatcagaacttgaaatgaagactagggaagggcagtgtagttccaacaactacctctccctatttggcacttactgcagcactgatttgtcagaaaacaagtattccaggccccttcccaatttttgaactaccagtgatagagtctctttaaagtaacaaagctattatgaaaatttccccccaaatcccttgtcatttgagagttgctaccagtcccattttacaagttaaccacattttgatcatcccatacttactgttgcctataccacactctttggagcttctagacagtatatttgcatggtccacagtggcatctggtctttctgacttgctatgatataaccaaggtcattattcagtcaaagaaaccacagaatgactacactatggtgcctagctgtaaatatagtcaacattgtctatcaaacttagacaccaagatatatttttcaaggaaagctgcttattccacaattgcatttagagatacctaatccataagatgtgatgtaggaaaagaagaaatatgacaaagtaatgaggtgattacaaaagaacatgttcattcttgccatagatttcaaagacttggatgaaagggcttgataaagaatgtgaaggaagcattgtaaggaagcacaatannnnnnnnnnnnnnnnnnnnnnnnnnnnnnnnnnnnnnnnnnnnnnnnnnnnnnnnnnnnnnnnnnnnnnnnnnnnnnnnnnnnnnnnnnnnnnnnnnnnnnnnnnnnnnnnnnnnnnnnnnnnnnnnnnnnnnnnnnnnnnnnnnnnnnnnnnnnnnnnnnnnnnnnnnnnnnnnnnnnnnnnnnnnnnnnnnnagagagagagagagagagagagagagagagagagagagattgattttgagaaaggatcaaacagagacagaaacaaagagattgtgagtcagataaaaatacaactgaaagcttcaacaacagcctggttgagaaaaacaggtcttttaaaatatccctgtcagatagaaaggaagaaaagaatgaatgggacacctaaggtgttcgggatttcatcaaacgaataatgacattttctttaaatacttaagactaaagaataaagtgaccaaaattagagaaaacctatctaataaaataatttcagaaaactttccaaaaatcattggaaggatagggatatccataaagaggagaatgctaggacccaaaatagacatggctaggaaacatgttcacatggcacattagaaactgttaaaagttcaagacgattttttacaaaagtctaaaataactaaggtgaagaacactgagttccactcaagggtttctccactaacgtagccatagatttctcagggagacccttgggatgaaattttccaaatctggtacaaaataactgcccaccaactaacttaacctctcttctgttgccttaatgaaaacagcccaacgcaaacgacctagggaggaagggtttactaccgcagagcttgaggttgtagttggttattgcaagaaagtcacaatggagaaaccagagtcagctagccacataccagttgtcatgagacagcattgaccagtgtcactactcagctcactttcttcccttacagtctagaatcccaggtaggaaatgtgatgtctacagtgggcaggtctttctacttccattaatgccatcaagataatccaacgtttgcttattctttgctctatactctagatacgaccagagacctgtctcccacactgattctagattctgttgaggtgacattttccattaatcatcatgtcaacagcactacatgcagcaagatgtacttcagaaattaaggccaaataaaatatttccaggacaagagaaacctaaaggaaatcaagaccactacgcaggattttcaaaagacacttgaaagaatgctaccttcagaagtgaaacaaagagggaaatcatgaaattgtgaaaatacaaattccattagaaaaatagataagcaaaggagaaacaaaggaatcaatactgacaacacattgctatgtcaaaccagaacaaggaataagaatatagagcaaagaatatgcaaaacagccagagagcatcaaaaattacaacagagataaattcttcatctgtcagtagtaaccttaaatccaactgaactgaaatctacaattaatggacacagactggtcaaaaggatataacaacaatgacaatggcaataataaaaaacttaaaactcactaatatgttacatacaagaaatgcacttcaccagtacacacacacacacacacatttcacttcatatatatgtatgaaaagtaggcaaaaccgcaaaagacaaagatgttcatgacataatagtcaagatatcaattcagcaggaagacatatacagttgtaaatttatgtataactaatgctgagggatctccttttaaattatattggcatatgcaagtttcataaaataattagtttcatcatgatactatgcacacatatacataatatataaataaaagatatatagtactttggtcatatttatttctctagaccccttcttggtcctgctttcccctgctaccttctttctaaatagttccatatcttcatcaatgcctttcaaagcatgtagatgacacatttgaaataaaaagttttatttgttttctgaatatgtcttattttgcttcactagttctttcaattttctggtaaaagacattatttccttatttattatggctaactaatgcttcattatatacatacactaaaatttctttattcagacattatttgataagcagctggactattcacacacattggaaattgccaatagttaatgttgaaattggatatgggtatgcagttatgaagtatgctaattttgatttcttcatctctatacttaggagagttatataggtttgcataatatgctaatttttagttatttggggacattggatagattaatttacatgcctcccaacaccatataaaccataatttatacacatcaccataatttgttgtttgtttccttaatagcaattctgacgggaatgagacagaatcttagtatagtttttaagagtatgatatttttatattttctttgagaatgtcatatattaataaaatatattttaaacatatctcccactgccttcctcagatccctcccagatcccaccaagtccatcttcccagttcacattctctttttgaaatatttttagaatctattgagtccaattagtgcatgtgtgtatatatatacacatacatatacatatatatatatatatacagatatacacagatagattatagatatagatatatagatatccaggggtgatctactggagcatgggcaacatatgagggactaaaattgactcttctactagcatccattagctgttaaaagcacttcagctagagctgagggctctgtaccacttcctgttctgtgctggaatattaaatataagtagaatggcacttttgcacccatgaccatatcttgccaagccagtgattgtggtatctcacagggctcccagctaggaaggactgttgatgacatgtctctcctagcagcctgcatagccttccagtactatggcacctagccattgggggggggcatttttgcttttcataattgtttaaaaatgtgattaaggatgttgaacatcttttccatgaacttattgggtatctgaaattattttgaaaactcttaattcattttctcatttcttgatggattatttatacttttggggttttcttctcttttttgagttgtttatatattctggttattaatttcctgtgagtacatacattcaacaaagtgtcaggatgggcttagtccttgttcttctattcccttgttctaagtttctgttttcctaagagtgtcattctgttttgattactgtggctctgaagtatagtttgtaactatgcattgttgtatcatcattcagtattgttactttttattaagattactttggctatttagagtcttttgcacttccatatgaattttagaattgttcaccagttttctggtggtctttaggatacttgaaatataagctcatattatatacaattcttgtttcttcattacttatttttatcacttactactttatcattgttctaagacttcagtcactattccaaatgaatggagagtgcatattattatcactgcatgatccttgttcacttatatctagtcaatgccacaatttccccatttcttactccatggtatctgtaccccctcctcagtgctccctaagcacaccctctttaacaaatgtggaaggaagaggaaagaccaagaggcaaaaaccatgtagttacaaaataaggacaaaattgtacataacattagataaatatattaaggacagtaaaataaaaataaagtttttaaagaagaaaaacccatattaaaacatagtaaaaaagaaaagttaagtaaaaaggagaaaaattatttttctgtgttctctaattttgagtctccatgtttgtgtaccttaaactttttctcttgactcctagttccattccacatgatcagaaaggatatagggtatgatttattttgcaatttgttaagacttgttttgaaattaatatgtttattgtagagtaaatagtggttctacttacaaactcataggtctcatggggatgatagggatagctgtaatctgttatggttctgctttgttctctgtaccgcttgatgtctgtggtttgtggttgtggttttgtgttccttccttctttgggaagacagcattggagctatggtctatgttttgctgctttttttcatagtcagttagtctctctctctctctctctctgtctctctctccttcccatccagtcttggtacatttaaactctgacatctctttgttaattcctgcagccattgtcttttttcttggtttccatagcctgacatatttatagagttgaatggagtaggctttgactctatcatattactccctatatccctcaaaataaaccttattgttatatctaaggatagagatttgtgttaaaaaaaaaaacaaaacaaagaatttctgttagtaccctgccttcatcagtggaattattatccagacaaaaagccaacagaaaaaaatgagagttaaactatattgcgatcaaatgaacttgacagacatttctaacacatatattaatttcaaaacaaatctttaaaattcataattatattctgtatcctttctgatgatgtgaaatagaagttaataacaaaaggaatttaaaatttacacgaatacatgtagactgacacaagtgagcaatttattagcaaagaaattaaaagataattaaaaactttgttagaacaagtgaaattgaaacaaaatttatgaaaacttatgaaatatagccaaagcagcactgaaagtttctctcagtaagctccattgaaaagagcaaatgtggaaacaaacaacctaatgagattcttcaggaatttagaaagtcaagaacaaactaaactgcaaattactataaggaaggaaacaacaaagaccagtgtagacaatctatatttaaacagatacacacacacacacacacacacacacacacacacacacacacacacgtatagtttgtaactatatattgttgtatcatcatcacacgtgtgtgtgtgtatgtatgtatgtgttatgtatgtatgtatgtgtgtatgtgaggacaaaaggcgattacttgtggggtggaaggaggatgaagattaggaaggaatagcgaagcacttactaattataaaagatcattgcaaaaatacaaagattaaggagtttgttctcttcaaactattccaatgaattggaaaaatagtgaacccttcgaaaacctgttataaaataccggattgctaacaaatctgattgacaagtacctcaaaaagttcatttacttttatgaagttagttttaatttagggatgtagagttattgttcagtatatataaatcaataaacctaatatacaatatcaacagaataaagggtaaaacatcatgtgactatctcaatagactcaaaaatcatatttgaaaaaacttaagattcctttttggataatagttcttaactatggggcgtggggaaggcaaaacttggttttggtagagtagtgctgcttattttaagaatgttaaccttcttgactctaagtttttctgtggccagaagccaatggctttggatgattaacacctaattgttaaatagcaagaattaagtagaagagctcttagctttcactacacccccaagtcctttctggtccaaggctgagagtttcttaactccttgtcagctagagagtctcagaaggaaatactcatcttgaaatttgattctaatctttatttctaagagaaaaaagggggactacttttgtcattaaaagaaaaatgtgtctctctctctctctagtagttaagaaaaaacccatttgcctattgttctcagttcttatatgttctcaggatacatgatcacgtcgtatttcaagcatctttttttccccaaaatttcacaacaaattgaaacataaactcaaatcataaattgaataagaagttacaacagagatgtttacaagtgttccattaaagctagttaactaaacattgattatccgctactagcttcataggttcattaagtgtttgaaacataattcttatgtttaagttagcactgtttatcaagagggaaatcatctgccctttgtctccttagtattgaaggtttgtatagataaaccagacaatatcttattttttgtccttgcacctataataaattgttcattcccttttatgacctttcattatcacataatggttttacaaccagcccagaaagaatgttttctctgatcataaatctgtttcatgcctgatttctatctttagtgcaattagctcaggacacatgaagacttacagagcactaattgcagatttcttattacagagagctcaaaattataaatttagaaatcctataggatcattattaggatttatgaaagcatcagtttgccttcatagaagtattacagaagagtacatcttcattgatctgtagaaaacctacccaatagggtgggctaatgtcaggaattgctatattagcttaatagtgacaggaaaggcatatcaactataagaagcaatcctgagaggaagtcttgggcattgcctcttagagctcactcattgcagaccatcaaaaatcttgggccaccttcaggaaaatcacctgctagcctttagcctatcctagatggcttctgaatggtatctagccaaaggaaatcaattcagcatgctcaagtgccatctacatgcctatattgtggaaatattttcaaaaagctaaaaggtaagatcagccttggtatactccagtaggtgactacatgaaggaaatgtttatatataaaaacaatggtgtatttctagccatgcagaagagtggaatcctgttctggttattagcaacataagtggaactgaagggcattatcagaagtgaaataagtaagctacagaaagataaacaccacatattccctcttatacatgataactgaaaaagtgcactcaaaagcagaagagtaactatgtagtagtttgaagtgatgaatgaatggatgtaaaaaaggtaattggatttgattatagcatactatatatatatatatatatatatatatctatatatatatagatatagatatagatagatagatagagatatagatatgtagctatcacttggaacttgtgtgtataatgatttattagtaagaaattgaaagtttttttccaaaagatattagtctaatgcacaatatacttttagaggtgtggtgacacccatggtgcccctccttggatttgtctcctaagtattgtcttctaagtctccaagtaccttgaatatattttcatattctatagtatttaaaaaatgcagttgtagcttttggctctccggtcggcaccatggcggtcggcaagaacaagcgcctgacgaaaggtggcaagaagggagctaagaagaaagtggtcgatccattttctaagaaagactggtacgatgtgaaagctccagccatgttcaatattaggaacatcgggaagacactagtcacgaggactcaaggaaccaaaattgcctctgatggcctcaagggtcgtgtgtttgaagtgagccttgccgatctacagaatgatgaagttgcgtttagaaaattcaagctaaccactgaggacgttcagggcaaaaactgtctgactaacttccatggtatggatcttacccgggacaaaatgtgctccatggtcaagaagtggcagaccatgattgaagctcacgttgatgtcaagacgaccgatgggtatttgctccgacttttctgtgttggcttctctaagaaacgcaacaaccagataagaaagacatcctatgcgcagcaccagcaagtccgccagatccggaagaagatgatggaaatcatgacccgagaggtgcagaccaatgacttgaaggaagtagttaataaactgattccagacagcattggtaaagacatagaaaaggcttgccagtccatttatcctctccatgacgtctttgttagaaaagtaaaaatgctgaagaagcccaagtttgaattgggcaagctcatggagctgcatggggaaggcggcagctctggcaaagcagctggagacgagacgggtgctaaggttgagcgagctgatggatatgaaccgccagtccaagaatcagtataaaatccagatttttaatagtgacaaataaaaagtcctatttgtgatcaaaaaaaaaaatgcagttgtagcatcttgatttctatattgtggcaaaaataaaattaaaacaagtgaaagtaaccacagtaagcagatagcttccagggactgatgggttttcctgatatgccacatggtgctctgccattctcatctgtgttgctatctcctgtcggcttagtgatcacaatctttagtactcgcccagtgctgcattctctgtacaatttactgcaaaggcagttacagagaagaatgggcagctgcactagccatcaactaaggcttccttcggttctctatggtgcactttgctcctttcatgaacttctgttctctttgcactactgctgtgttagctactttggaataaacatggccagtgctacttagatggcattctcggtagtcaaatgagagaaatcccttcaagtatggctgctttctttcatttccttcctaaatgatttatatctaaagtatttacaactaagttctagaggttggttttcaatattttatatctctctcaatttatagacatccaaattcatttggcattatcttcctatttattgagattcttgaaagagtatatttttctataaaaggttccagaaaacttagagtagtgatattatcattaatctcataagcaatcatgcagtggatagtgatattaaacatagattgagttagatagtatacttttaagacataaaaatcaatttaaaaagatccctgttcaatgacttttttagccagtccagtctatatataatgtactgtacatattaatacaatcttattaatatgaatgtaaaaagtaaatgaatctatggtgtgcatcatgtatagtctctcaggatttgttctgtccattactaacatatatatatatatatatatatatatatatatatatatatatatatatttttttttttcttgtaaagctcaaaatatctcttagactttcctgcagataagttattgaattaattacttgttgtttactataacaaaataccgagacaaagcaatttaagggaggaaggggtcattttggctcacagccccttggtttgtttagtccatgggaaagacatagttgcaagagattgaggcacagagagtaatgaatgctgtgctcagcctaccttcattttattaataaacctaatttagataatctcttgtaggcatgccacatgcccggaagcttgtcccttgtatgattctagattttgtcaagttgacaatattagtcaccactgctagaaaaccttcttaatggcctagagtgctggaggaattctgcctagccaggctcccgtgaaacatttctgagtgcttagggatttatgagatttaacgtgaagtgagacagacactggcttctgtctttttatttgccacaagtgggattcctgcttgctcttagaagttggcctaagtctcaggatccagtcatgaaaggtgaagtctaaagggtagggagtgggtgctggctctgttattgaggaatacacgaggaatctatgaattgggatctggcagctatagctgaagagtcagcagcttccctcttaggtgagctctagatcttagaagatacacgagcccccttccttccctgtggctactcacttcatcactggggcaaagcgctgttgggaggcagcttctcgatcccagatgtagtagcaatggtggccctgttgtgtgatgtggcttgagtattgcatctgacagcttggtgtaagcacatttcttcagttctcccgagtggaaacttcatttagctatttgtattcttagaataatagaaaatagaaaaccttctctacttaaatcatgttcagcatcccacaagggctcaccctccctccatggtgtcccagtgcatgctattgggtttcatattattgcatggaaagttgctgaaacacctatagaaataaatacaaatataataattacaaccaagtctttcccaaggctactgcaaaatggctatacaatcctcacaccttccttccatctaatcgatgagctattccttgagacctacagagcctttggttataaaatggtctttgaattaccctttgaagcccaacaaaattgaattgtatgaactataaaagttaggggaggcagaaatgccagctctcccgtggacagctttgcctttcaggtcttgtcactcaactagaaacttaaaccaccaatattctactggacctatagggctactgcttttcgtgtgctaagaagtggggctaatgaaaggccaaggcagttgctcctgtcatctggaaaatgacttagttttgctttcttttgtgacatcagtcttcactctttgctctgcctagtcccttgttcttgcatttgagagaagaaagcggcagtaggaaggtggtaaaaatgctttcttaaaggctttagagaggacgatcaggggcagcattttcataccagagggacctgccttccagttagtattcattcggagagaagagggaaaaaagtaatgccatctgtcaaacagctgtgttccccactgagctcaagagacagacaaagaggatgctcattcctcaacccttggagcaattgtctcctgaagggaaatggtgtgtatgactaaggaggaagaatgctggaaagtttgaatttatgagaattcagttcacaacacacttttgaaggggataaaaggactaggtggaagaaagcccaggcaaggcgaggagtagctgcgttgcctcagaattcacattcagctacatataatgcagctcacaaatggcttaaatatataaagctttcatctttggtgataggcagtctgagcctggcatggcttttctttaaggtcaccatggacccagtttcctgttagttctggagcccatttttaagcatgtagcttccatggccaaggccaacttttgattccgaaccactgcttcttggatgcactggcacagggctgtgtgtgtgtgtgtgtgtgtgtgtgtgtgtgtgtgtgtgtgtgaattcttagctactctggaggctgaggcaggaggatcatttgaatcatttatcatttggagtttgaggccagtatgggcaacatggtgaggccctgttttgagcagggaaggggagtatattagagaggaaacagagaagagaagagagaatgaattcttagttattgactttttcccaatcagcagaaaagcagaggactttctctcccttgaggctcagaccaaccttcttcttacatcttctcagccagaatttagtcacatggactcacttaggtacacgcaaagttgggaaagtctgtctacttggcaagcaattatatgtgtagcaaaaatctggagtgctatatgcaaaggaagaagcagagcagacactcaggagactcctatggtctctgccacacagtctgagctaggcaagaagaatctatgctgatgctgactctggccttttggccctgtacagatggcttttgaatgcaaaacctcttatatttattttggagtgatcttggaagctggggagacttccaaagaacatctccaaagctggccaagtctatactcagttgtataagataggcaatggcacctgaggctttttcatctacccactgtagggtttaattgattgaaagaggagcaggtgtaagctgcagtccatgggcacagagcctgtgaaccttgcaaggctaatgccctcagataaatgcctctaccagctgaagttcttgcagagtgctgagaaaggcaattgcagcagaaacttttgtttctgagcttacaaaagtataagtatataaaggtgtttttagagcaacgcatatctgaatatatacttttgggccaacataaacctaaagtagtatattttgttttgcccaaagaatttcagaaagaaaaaaagaaggttggtatttttaaattaactcatttcatatatgtatgtgtgtgcatatatttcctacagtttacaggaaagtctttgtatcctagttaggggactgaagcaaatagctcacaaattgaaatcctgtactctgtatgtttagcaagcttctccccaagcttttcgtggggcttagtgaagcaggtactgctttcttgttgaaaggagagtttatacaacagcttcttaaatcccttcctaaaacattcccccgtagtgtcctgacgtgtgcaaatatgttgtttcaacccttaaaagctgacttggaggtcactaattacagtgcacaaaaaccacacgagccgttagtgagtgttagctttccgatgtctctcctttaccgaaggatctcagtgtctcccagtgatggtgacttgaggaaaacttgctttcatctcttggggctttcatgtagcaatgctatttctaaattccagactggtcttacttccgtccagtcccgatctccgcactgcattcatgaactatgatttgaaatctctacctcacacagtaaatgtcaacagtttggaacgtgattttgatctttgaatctgttgaagcatgtgtgtgtgtgtgtgtgtgtgtgtgtgtgtgtgtgtatgtgtgtgtgtgtgtgtgtgtgtgtgtgtgtgtgtgtgtatgtatgtgtgtatgtgtgtgtatgtgtgtgtgtgtgtgtgtgtatgtatgtgtgtatgtgtgtatgtgtgtgtgtgtgtgtatgtatgtgtgtatgtgtgtgtgtgtgtgtgtgtatgtgtatgtgcatatgtaggggaaatataggctttttgctacccagagaaacgtgtacagtctctttagttttcctaagatgtataagctgataattttgagatctggcagcatccaccacacctgagaaagcccggagattttaattaacgatagtgacatacattaatttcattcctacagtcctgccctttgagttcttagttctctatattatattttgttaaccccaaaataaccacagaggattggagttaaagggacagagagacaatgttcgcattagctcagcattttgaaggtctcagttcacaattgggcacagtttccctttgggcacatgggagacaccacataataacacaagggtgtagtgaagcaaaactgttcagcccatgattaggagcaaaggaggaagaggatggggcctgagctaccatattcctcctcaagggcacacgctcagtgatctaaagcctttgcagtaggcctcacctctcagaggtcccaccgtcgcctattagcaccactctggctccaagcctttattgtctaggtctttgggggacattcagcatccagagtatagcacgacttttagatttttgcctttaaaatgtatattaagtttaaaaagtaatataaattccttaaagagtgtttgcagtagagaaacaagctgaagaaaagtgaataaataccgtcgagttccacagaggttattaaattggaaattgaattttgagaaattgggcttagcactgtttcataagactcctcatctctaatgtataaataactatttcaccaacgaatgtgtcacagttcccaggctatttcagaaaattcttttttctgctaagaccaacgcatgttaaatggaatgttatatgtagaccatttctatactgaagattttttataattaaaaatattaaattcttagtatattggtattttaagggatatattttatttaatattatcttgctgggtgcacatcctgtttctcaatttggtgcctggctttcccttgccctgtgaggcaggagacaaggaagtagacagaatgggttggttccacaactctgaactttgatctgttgtagtttcttgtaatggtctctcacctgttgatgtaagaattaatagttagaatatagttagggattaggttggttaataaaatggctactgcaggttttccttcaatacaaaaacatcatcttataatctcaattgtcctttcaaataagagaggcagaaggagaagggacagaaatgaaaaaaaatgtgaaggatgttctctgagcattaggaaagcaatgttcatgttttacaggtataagaaaccagatcctgagatattagaagtggcctagatctcatgattagtggcagagctggggccaggtgatacacatcccaatttgtgagtgtagcctaatatctcactgtgattcatcatgactgtccagtgcattggacacagctatgaatattaggatggcaatttgtaaaaccaaggaaaatggattgaacaatttttcctgtcattttttacaagaggtggtaaataatggtaatttgagatattagagaacagtgtatgaatagttttctaaaattctgcaaggcagacagagaagaaaaattgtagcttccctttgtgcctattactgcctggccatcaacaaagcatcttctttaacttatgttaggatgctgtgaacgagtcctgcactgtcagaaccactcagcaccaaggaggacgtcctagttcaatttcctccgaagtttaacaggaataagacaaatggaaaacaacaaaaaagacatctttaccatgaacctcatgaaaatggaaaattcattccgaaaaattcaaaatctattacaaattgatgcatgctgcatacttattcatacttattctccatttctttgttcttgtaagattttaaaggggaaggaaatgagacaggaaagaaaacaagagtcatccatccattcaaaagtcttaattgagcaagtagctttgtacttgattcagtgaataggagcaagatgttccctctgaagaaaacaagttttagagcctatgaatagtttttagaagcacttcagtgatttttatcatttatatggaaattcagattattctggaaaacagtttggtgacatgtctcaaacatttaaacctactcccttggctcagaaactctacttttagaaattcaacctgttttagaaatctagtccagccgggcatggtggcacacaccttttttttttttaatttatttatttttcttttttttttattacgtattttcttcaattacatttccaatgctatcccaaaagggccccccccccccacactcccctatccacnnnnnnnnnnnnnnnnnnnnnnnnnnnnnnnnnnnnnnnnnnnnnnnnnnnnnnnnnnnnnnnnnnnnnnnnnnnnnnnnnnnnnnnnnnnnnnnnnnnnnnnnnnnnnnnnnnnnnnnnnnnnnnnnnnnnnnnnnnnnnnnnnnnnnnnnnnnnnnnnnnnnnnnnnnnnnnnnnnnnnnnnnnnnnnnnnnnnnnnnnnnnnnnnnnnnnnnnnnnnnnnnnnnnnnnnnnnnnnnnnnnnnnnnnnnnnnnnnnnnnnnnnnnnnnnnnnnnnnnnnnnnnnnnnnnnnnnnnnnnnnnnnnnnnnnnnnnnnnnnnnnnnnnnnnnnnnnnnnnnnnnnnnnnnnnnnnnnnnnnnnnnnnnnnnnnnnnnnnnnnnnnnnnnnnnnnnnnnnnnnnnnnnnnnnnnnnnnnnnnnnnnnnnnnnnnnnnnnnnnnnnnnnnnnnnnnnnnnnnnnnnnnnnnnnnnnnnnnnnnnnnnnnnnnnnnnnnnnnnnnnnnnnnnnnnnnnnnnnnnnnnnnnnnnnnnnnnnnnnnnnnnnnnnnnnnnnnnnnnnnnnnnnnnnnnnnnnnnnnnnnnnnnnnnnnnnnnnnnnnnnnnnnnnnnnnnnnnnnnnnnnnnnnnnnnnnnnnnnnnnnnnnnnnnnnnnnnnnnnnnnnnnnnnnnnnnnnnnnnnnnnnnnnnnnnnnnnnnnnnnnnnnnnnnnnnnnnnnnnnnnnnnnnnnnnnnnnnnnnnnnnnnnnnnnnnnnnnnnnnnnnnnnnnnnnnnnnnnnnnnnnnnnnnnnnnnnnnnnnnnnnnnnnnnnnnnnnnnnnnnnnnnnnnnnnnnnnnnnnnnnnnnnnnnnnnnnnnnnnnnnnnnnnnnnnnnnnnnnnnnnnnnnnnnnnnnnnnnnnnnnnnnnnnnnnnnnnnnnnnnnnnnnnnnnnnnnnnnnnnnnnnnnnnnnnnnnnnnnnnnnnnnnnnnnnnnnnnnnnnnnnnnnnnnnnnnnnnnnnnnnnnnnnnnnnnnnnnnnnnnnnnnnnnnnnnnnnnnnnnnnnnnnnnnnnnnnnnnnnnnnnnnnnnnnnnnnnnnnnnnnnnnnnnnnnnnnnnnnnnnnnnnnnnnnnnnnnnnnnaccatctagtgattgccatatgcaggggatccatcccataatcagcttccaaatgctgacaccattgcatacactagcaagattttatcgaaaggacccagatgtagctgtctcttgtgagactatgccggggcctagcaaacacagaagtggatgctcacagccagctattggatggatcacagggcccccaatggaggagctagagaaattacccaaggagctatagggaactgcaaccctataggtggaacaacattatgaactaaccagtaccccggagctcttgtctctagctgcatatgtatcaaaagatggcctagtcggccattactacaaagagaggcccattggacttgcaaactttatatgccccagtacaggggaacgccagggccaaaaagggggagtgggtgggtaggggattgggggggtgggtnnnnnnnnnnnnnnnnnnnngtgggtgggtaggggattgggggggtgggtatgggggacctttgggatagcattgaaaatttaaatgaggaaaatacctaattaaaaaaaaacctagaatatgctcctctttctaaagggatgatcaaagaaatactacttacactctaacaaaactacacatcacctaagactcaaagcatgacacaaagttatgggatgtctatttcctttagttttatgcaactatttaacaagtgtgaacatttacatttatttaaataataaagcatgtgcaatataatgtcaattttaaaaaagacagggccataaaatacatacaatattaactgagtaaaaataaaggaatcttaaggaaaaaagtattaataggtattttctcttaagttctaatgattatttttatttttatgacattcttcattttttacagcttgacattattatcttaaaatcgacaagtcaatatgatttattttcaatcttaggaagttaatactgggtaaactatccatttttgctgaaaatgatttctgtacacatatatctataactttttaatctaatggctcactcttcatagaaaatatatttataggaaatatatgtgtagaaaatataaaaacgtatagacatttagatgaattaaagccgagtatattcttgtgtgtagttaaactatccatttctgtgtgttcaccatttgtatggcttttgttataagtctatagagtaggcagtgtaagcgaaccgctcttacataaggtatggctgacacgttacaagacagagtgcacgagaaggctcttactgaataaatacgttcttactggagaacaaggatagaggtcacttaaaagatactgtctaacagcactgatacatccttctgctctataagggattggtactcagttatagaagctcgtgacctcttcaagttggaacagtgaatttaaggtactcaggaaaactcaagacgccatgctaacggttacttaagcacatactatgtagacaagaaatctcatagatgagaaaaatcatgtccacgtattttgggggatgatttgcatcatgacagtatattaatagggaatcattgttcatgaaacaagaaacatatagaagtctagtatcctatgttatacatataatattctagtcctgcaaaagtgagactgttatgtggtactcaagagccatcaatttaacaattactgggtccacatttgtttgcaattttataaaagccttttctccgttttatcatctaaagaaataaaagcataatggcccccaaattaagaaaaatcattttaattacttaattcattattcaggtgaagaagagctgagccatcatatggcattgccagaaaatctaaatattagtgagaacaagaatcacctgctaactccaaaacacagaatctgccattggaaagcactgttgtgtggcttatgccagttagaggaagctgatattatgatgaaaccagacaagacattggagaagcccctttgtcattgcagactgctcaaggcccaggggagccaggacaaaccttctgtcttctccatcctccatcccgcaatcttgtagccaaacacaggcagctggcaggggaacctgcatgacccctgggtgatatagatcaagaagtggggtgtgtctgaatggccaagttttgtgagagtacaagatctgtctaaagcatttagaatgatgtcgggtgtgtacatgctcagtacattcatcagtccgtgtgattttcattttcactgttgtcatcattggtgccattttcagaatagtcacatctgtttgtaattaccccttacctgttgtgagcctcagtacagtagttccttatatccagtttcttagctatgctccaagccatcagtgcatggctgctatggtagttaatattgactgctttatatatcatgattttcctccctctctatatatgaatacctagaaagttgaggtttgcttattaattaggatattgagggaaataacaataacaaattttaaaaggacaattctgagtaaatattataatggatcttattgaccgctcttgtatcttcggtcagtacaattcgagatgatgatgcaacacctacaggatggaatgtgtgaggtcaaccatgtaggcttcccataagtgaaatggcagaatccaaaactatgcgtgaaagggaatgccttgttcctgattatattctcctttcttctggacctcgctgaggtcagatcattcattctttcagcatttccaaagggcaggagtgttccacgtctcttgcctatctggcctgtgcagagaccggttacagtccccgctcattgctgagcagggttgagctgatagacatacacagccttgtgtggagagatgcttgggaactaactgtagcgtcaatgactcttcctcacacgttttacctcatttagacttcagtttagccatgtcccagaaagctcaagctagctcgctatttttaatgtgtatttcttatagcttgacattaaagctagtgagtttcaatgaatcagcagctctgtaagatgtgttagcagatcactactaagggtctcctgtgaagcaaaagacaggaaatataaatcctgggcaggggagccccaaagctttgccacaaaggcaccccgagttcatcgtttttttgagaacatgttcagtaaaatattttgtggtgacaagttttctactgagagactttttaacagtatgaaaaccagcagcattttcaggttttaaaatggtgttagatttttctaaaaaccccacgggttctccagttctacatatttttagaaaggtttattgatctcaaggagttaaggttatcttcttttttcagacagtctactcttcaatttaaagctaagtctccaatcagtaagaatcaatgataggaactgcccaagatttgttaagtgttgcatcggaatcaattattagcttcagtacctcaggttccttcccattcatatgacatttggacttgaaccaacattgagtcatgtgcctgccttaaagattaggaaacagaggcccttgggctgaaagcctctccaaggccacattacccaagcctcaatactcaaaacacagactcttagaaactacagaagcctgacatttcattttgccagctaagcaataaagaaaagcgagttaaaaacacatagaaacacgtgtgaataacctccgggatatagattactaaaatgttaaagaatgaacagatttttttaaagagcatctagctctgcctctaattttactgctgagaaaattcaggaaagaagtaagtcttttattctgaaggagaccactcccaagttacaaggctcttcccttcttcctctattctgagcatgtcccattgctattcaccaatgagatgaaatgactcttactgattctacaagcatcttcatgggctagaatcagaaaaagctgaggccctgtaaagattcacagatcccatgggtagtaggccgctttccttcttcattatctttacatttagtgttaatcagatactgatgagtaaaaggctgatgaaaaggtgtttggctggtgagttaactccagcttaatatattcactgcatgtttaaaggtgttttgttgttgttgtttcgaatttcatacacaaacatatctcctgtattacttccattcttctttcttcactaaatccttcatctccgcccccccccccaaatttatgatctcttctgtaatcatcatcattacacatatataacctcctgagtttacatttagctttgctcattgctgtatgtgtccatggctggcctcttggtcttggacagcctatgtgggagtttggccctggaggcaactgattctcactctcagcaaccatcttctagagctagggctgtgtggaatttctgtcagccacattggtgtagtagccgaagtcatcatgctggtcttgcttatgtgactctattgttcaaaattcatgggtacatttttttcctgtcattttagaagacactatgcagcagcaggcatcccgagtctcttatttttgcagtctttcagactcctgtgcattctccttgtgcttttggtttacggcttgcattgcaaatacatcagttgggattcagcacctccatagccacacattctcttattttgaccgagttgtggatcagaggacccagagaagagccctgcaggctctcttgattctttcaaggatggcctagaaattttggttcggttcatcatatttgagtcatgcagttgggggtactgctagcttaatcatggccattgaacagatggtggaaggagagagatgtgtgtaagaatctcaaatagaagagaactgtattgaccatagattcttctggctttagccactggaccttgacaacagttagaagtgaccactgcaatccaccatcagcctctacacaaaggctccttctccatctgcctgggaccacagccaggaaagtgaagagccatggcaatggtggtggggtggaaagcatgagaactcaaggaacaggatgggggttagagacaggagacctggcctcctgctggtcgtccccatttcttctcttacaatacagtgggggctcagtgaccattatgatgttcagtatttataattcttattgtcctgtgaagtgtacatgtcagaacagcagaaaaccctgttattttccacgtagaccagtcacagggtatcacgttgactcactagatgattggtcataatgatgggggtcactgatgcccctttggttttgagtcagccttcttaggccagcactgttctttatggtctccttgtgaaaataaagcagttctctaaagaattcctgcccatttacttgcaagctggctgatggcagaagttcagaataagatctcatgaaaaggtaactttgggaacatagcctttcttcttattacatacaacaggaacaaggccaacctacatgcacctatatgaggccagtggttttggaagtccatcttgctaccatttgtctttgtcagtgggttgtgcaaactcctttctggactttgaacttctccttatccctctccctcagattactcatcgaacaccacttagagaggctccttaacctaaagcctggttgaagctcaaatttggcagcaaataagaatgtctttgtgattttatttgttaagaaacactgtaagtgccataggaagggatataatgagtttgtgttctgttctattgctcttcaataaccttatcgaagagggctattatgatttcctggagaggtgagtctacagacgtgtcacctgatgctaatgacaactgaaaatacgaaccattgtacgagggtagcatccgaggaagagataaaattctcattacaacctttttaaagatttctgcattcaagtgggcaggggagaatctccagtccattaatgcaatccccctttccgttctgagccaagtgacacattgttttgcttcccaagataagacagaaaaataataagtactcttcaggtgcccttgttattctctttgtcaaaggcagtgtggttcaaaggcttttcctttgtttagtttgtgcaatgtcagacaaggctctgaaagcagggattccctgaacatcccactgtgggcctaagcccttattctgcttccatcagagagcatgctggcaacctcagggaggttttatgccagttcttgggtggttccaaaaccgcactcacatcatataatcttcagtggtttgggctggtttataatccatcctactgtggtttgcttctagacagaagcctttaaggcagagatctcctgtgagctgcactgaaagaggtctgcttcggaagaatttgatcctgctgagtagatgtggcacacttccaactgtacgtgttgcgctgccccggaacacagttgtgtgaggaacacagacatgcacgaagcggctagcttttagaaggcactaatcccagtggggataagggtgagataaaaacacacatgaccaccatgaaatacctgccttcaaaaggcatagtggggaagacgagccagagatgctcaaggaataccacacagtttaaagtgtgacattatttgagcatggtagaagaagacttacagattgagacaataatatcccccacccccacccccacactctgtaaagggaaccaggaatagaaaggatcttatagaggtgctgtacaccaaccatgctaaagaaagtgatgtagtttggcacgtgtcagtcttgggcttgtgggggaactaaacactctcctgcttcctgttttgggcagttgtctgcagtgtagatgtttgtagggaggctattcctacttctttccccacactctggtagccactgggactgtggtcatgcaaatcacatggggcttcaggatctgaagcaaatagagcttggctgaagaagccgtttgacttgacctcaggtatcagtattgttgtatctgttgtttgtcagtgctggcagcaacagggtgctagttataataattgctatggagtggtggttgttatccttgctgtttggcagcttgtgtgtcctagcatttgtcgacatccatgatggtcctgtagcctcccactgaggctgtgaaccagcatgtcctccatcagagaaggcttttgcagttctagctagccagggttgaattcagttgcaagaagtgaagagtatgacattgcctgcatgagagagtctggttcacccgtgtaacccacatgctcagcctcgttcccctgggtacttgttccccccatcttcatttgcataacttcctgttttgaaggatgagtacacgtactttgcaattaactggtattattggagagtttattgcgttttatttcctgttaagtgcctctacaaatgatatacattttccaaccatgtcccttcaaaaacattgtcttaggccagctgtggtggatcacatctttaaactcagcacttgggaggcatagacatgtagatctctatgaattccaggctagccttttctatatagtgagcttcaggccagccagggctccatagtgacaccttgcccccccccattgtctttttttgtgatttttttcccaagaatgactaccttttgtagggatcctgttttcattgtgtgtccagacttaattaataccagagtttgggaaatgaacagagactcacgtggtactggaattatgggcattataggaatatgaaaacaaaacaaaacagaccctaaaaaaccatagagcagcttttactctcatgatgttaaaggaggaataaaacgatccttgaaatgtctgatgatgccataggcttatcacccactctaaaatcagatttatttgcatcttataatccttattgtaggaatctgtaatttttgacagatacatacactcatgcaaatatatggccatttgactcccacccttcacagaatcctcattctctttcaagccaacagacctccatctataggaaaccaaatctaccaaatatgatatgatatgatatcatccaacaatataatacaatataatggtataattattatatttatatatcaactcacctccaaaaaaaaaaaaaaaagatggttaggaactcctggagctttgactgtaacatgcaacaccttatcctggcagttttcatctttccttcttaggtagatgctaacaagactagactaggttcctctcagtctgtgtgaaagcatattttaaagacctttgacatcgtgtacactacggagaagcccagcctttctgctgtagagcaagccaggcagggcagtcacttggaagcacatgcttgtttgattagtgtagttgccccttttctctgtgcttctccattcttttcctggctcctcacctactgcatgcatttccaggtccacagccctgccgcttcgcctagactgccaagctggcagatgctaaagggattcttgtttacagtgacttgacatgtgcatgccatcagttaatggtggacagatagctcctttggcttctaagtgttgagaaaatttctttcctgcccacactctgctgtttctttaaacctcctcaacttgatctatgactgtgctaaggtcctcagtgtacctgacacatccttccctccctccatatcaaaaggcaccaggcaaacaaacaaacacaaccatcccagcaacggtttctgagagtccaaggccacacccctgtgatgatctgatagtctagccagctgtagaaagtctagtcttgttagcatcttcctaagaaggaaagataagagctgccaggataaggtgcttcgagttctagtcaatgctccaagagttcctaaccatctttttttttgggggggggtatttattataaaaaaaacaaaccttacttttttgtggaccttttctctgctatctttgatatgtctgtgtatctcatacaacccaaacatatttctaaaggaaacaatcaacattccttaaaaaacctattatcaaaagagacggagcctacctcccattcatgtaggaggatagaattccaaatttctcagtggccaatatataagcatagctggccccaacacattcgctggtcttttcaatactgaccgagccttcctaatgtccttccatcattctcctgttaaatggcctttaaaaggccttgctacctcacccctgtacaaatttgggctgggatccccacttccctactgcaacagtgtaggaagaattaagacccgcccattcttactcctttacctggggtctggggttgtgtttggcatcaagactagggtgagactttgatggagcttgatatgagacaatttggggtattcacctttaatttctcatgttaccttgtacaaggcatcttctgagcccatgctcacagctcaggccgttggtatgtgttcctctaaaaggctggagctagaaagccataatactcagctgttttcaaggggagaaaaaaaaaatagaacaactctaaaatacttggagttccagtgtttgcccttgttccctttatgcttattttccttctcagaatcactaggaatagatagatagagggaggtcctcttgtcacacgagaaactcgtccccccttccaagttcccccatgttctagctcaactggctcggccgctctctgacatagttgctctgccgtgcagggcatatgcttccaaaacagacagcattcacatagtgggatggaggagttcaagtgctccgaacatagggatctggatgaaacagcctctgtaagatctggagggagtcagcacagactcagaagagacgatgactcagaaatcttgatttttagacacatcaccttctggctttttgaattactatggtgaactttgcccaagacctgtaatatgatttacaataattattctattcctaccctcccgtaatctggcaagatgaatgtgttacggttattagcttatcaaactggaagataataattattaagtgggtcttttgagagccaggctagggtgaattattggagcagaggtagttatcagaagggcaccaggtcttcgtgacaattgaatgtggcatttcagaaatttgtcttttttggataaatgcaagagatattttttcataactaaatcttcaggaagaaaaaaattggaaagatgttctggcaacagaggcattctaaatgatctcgtcaatatgccgtactcgatgaagacaaaacacaggaccaaatttatggagtctgagtccatttctgctactctaatagaataccaggctgggcaatttatatatgaaagtattgaagttgctcttctggagactggggaggccagagatatagaggcagcagctggcaaggggctgcattctacagcataccatgcatagcaaggcacacgggtacatggaatggagagggtatgataaggatgactatcttcatggtattacacggttaattatctaataataaccaggccgtcctaatgattaaggttactcagtcatttgtgaggttccgtctccatgacctggtcaccttctaaacactgctgtactaggcaccgagcttccaattcatgaatttaggggagttcatttgaaccgtaggattctgggaagaaacatctattcctagttatggcagcatagtctgtgtgtgatccagtgtatctgggggatttgctggacagaaaggataagcccaggaggcaagatgctcttaaacatgtaaaaatcgtgaggaaatcttatttagattctatagtgacctgttctctatttcctcataccctaccctgtctcctgtactgtcactccccccatcacagattatcagtttcagccagtttcagccatcatgcctttgcccgctctttgtcacagttgtgctttacacacctcatgtccaaggatctagcagttactcagtctcacgcagcaagcaggcgaaggagcaagagcaagagctagactcccttcttccaatgtccttatattgtctccagcagaaggtggagcccagattaaaggtgtgttccaccacacctttaatcccagatgaaaggcatagcccagattaaaggtgtgttccttaaactcggagattcaatcttctggaatccatagccactatggctcaagatcttcaaaccaagatccagataagaatctccaagcctccagataagggtcactggtgagccttccaattccggattgtagttcattccaaatattgtcaagttgacaaccaggaatagccactacaatccaccccttgtcaacttgacacaaataatatctcatgttcacatgaaacaataacaaggttgtaaatacgcctaacatgatataactattcctcgtataatcgcaaacgcatttgtaaatttacaagtgggttcattgtctggaggacagatagaatttagaacatcagtgaaacttgctggggaaaagatcggcacgttattgttacaatgatctaatgtttaccactttatccggtcattgttatagggaaaaaacccaatatagaatgttagcatcacctgccagtggttgtgtgatagaaattacagtcgtgtcaccttgtggtttcagatatttctgtgtgccttgttttgctcatcactcctgaaattgagatagttgatttggccaggtccaacagatcttgctggttagtttgataacagagaaggacatatactaacattccacaaatgcattcttatcttattttcactatacagtcatttctgctatattgcagcacatgtatttctaaaaaccctttgctacacataataacacagcaataacttcagaaatcatgggaaaagttggactggggacagactgctgaaaacagtcaactatgcattataagtagaatacaatacaaatctaataaaatgttatacatggttatacattacatggttaataaatacatatttattaagataaatataattccttaaagtttgctgtggaagcggtcccttttctgattttctgtggagtgaggtttcttgcaattagatgccaggtataaacaggtgcagctcatgtagcaagtggaggaaactgggagcaggttagggtgtaattgcacagtattaggattctggtgaagtccagggtctatagttcttgtcattactctaactatagactatgatggaatgatgcttaaataaacacaaaacctgtgctttgcttaaattattccctaatgtgttagttgcagtaaaaaaaaaaatgtttttaaagcaggtgttagagcaggaattgctgtaattgattttctctgcaattcactgtagtttctctctctctctctctctctctctctctctctctctctctctctctctctctgtgtgtgtgtgtgtgtgtgtgtttgcatgcacgcatgttaagaagcttgcaagcttaaaaggattcattgcacaagtgtaatcaggattcctactataacctccttccccccagttctctcatgatcaccttcttgcatcacccacagctcctactctggagtcatttcttctatcttggagtttgtggcatatacttaaaactgcttcgttctgaactgaaatactaaactctcccattttggattaaaaaaaatttatttattatacataagtacactgtagttgacttcagacacaccagaagagggcgtcagatctcattacaggtggttgtgagccaccatgtggttgctgagatttgaactcaggacctttggaagagtagtcagtgctcttatgctgagccatctcaccacccccttggatttttatttatggctttttgtctttttttttttttcttccatggctgtattctaagctcattaatatgtaaaagatgatattcattctgtcctcttcgttcctttaacgcattaaaaatttgttctataacttccttttgaataaactacaaaataatattactcagctgaaaaaagaacaggcaataggaagttgtcataattagttctcaaatatggttctctgttcataaaaaagttctagagtgttggcagggcaacactcctgttgttcaaagtcttttttcaacctgaatgaaaactcttgctcagttggctgaaaatgttgtcaggttgaaagggatcatgggtacaatagctgcttttggcactttgattcttaaatactacactgctcagggcacacatatgcaagtcagctacggcttcagaaagtgtctatgaaacgttccaaaccttctccacatgggcttgttcagcatccttctgttcgggtgacacagcttggagctgaaaccacggagagaacagcacagcaaagcctttgccagaccaactgtgcccattttgaaccgaggcattttgtgtccccagccatatgcagcgtgaacaggccacacatgtacattaagtgagtgggtgaaggaacttttgttgggaatgatgacagctcagtggaattcgtccttggaattcttattcatctttcttatattttaagcttggggccttgggggtattttggtgagttggcatctgtattttaagaggactgatggagtgagtcagggagagatcgagtcataaccgagctgggagaagagctgagtggatccttggtaagattgtaataaagaagccgtaggaaggtcatgctttggagcatggaactctctgactttactgctcgacctaaatcaacctctcctgggcaggttgtgccacgcctagcccaggggtctaggatggcaggaccctgcacttagatttccctgacagaacaaaatgataagttctgagctcagtgtagtccaccccttgacttctgtgttgaggactttttctttttgtctctataatgtcatctgtctctataatgaatcatatgtcaatctgacatggctcttttgtctaaatgactcagagctatatctatacaaggcccctgcactcactctgatatttttttgttgcttttcagttttttctttagattcttttctcacctaatatatcctgattacaatgccctctccctctactgcttccagttcctcccacatctcctcccatttagatccatcccttttctgactcgtattggaaaagaacaggctaccaataggaaatactaaaatggatgcaactagaaaaaaaattatcctcagtgaggtattccagacccagaaagacaaatatggtagatacttgcttatatgtggatagctgttcagtcaatgataaccaagatacaaactgtagagccacagagggtaggcatagaataagaaagggtacagacagatctcactaagaaagggaaatagaatagatggggctaaaatgggatgctcaacccaggaggagaaaggggtagcaggagggagtatgggtgagagacagctaaaattaaagggcatttgagaggtaacacacagtagaaacctcctaaatatatacatattgtgatggtttatatattcttgacccagagagtggcactattaggaggtgtagcctggttggagtaggtttgtcactgttggcataggcgttaatacccttgttctagctgcctggaagccagtcttctccaagagacattcagatggaaatgtagaactctcagcaacaaagtcttccatatttgtactaggatggcccataagccccactaaaagcattctactattttccaaatccaaagtctgaaaaatctacattcttccaaacaaaacatggtcaggcctatgacagaaatacaccagtctctggtaccaaattctgtcctaggtagggttttaatgctgtgaacagacaacatgaccaaggcaactcctataaggacaaaatttagttggggctggtttacaggtttagaagttcagtgtattatcatgatggtgggagtaaggcagtatccaggcagacacggtacaggaatagaccttggaaagagtgtcctccaacagagaagtggttgagaggtctcaaatctagtcattctatggtggcaccctttctgaacactgttaagattatgggcatccctaaggatttgggttctctttgtctccttgtagcaacaacggttaggatacttgaatattggaatttactggctcattgatctgaaactaagatttgggttcctccaaagggaagacaaggtccccccacatcaaaaggcagctctttgtatggtcagagaatataaatgtctatcaaaccatgatttccatatctgagtttgccaatctcagtagggagtaagctagcaggaagagaaaggggatgggctaaagcctgggggaccaacttcttctcaatccctgaatccaggtgcataacatttcctggctactttgctcatatgggcccattgagtcctatggaacacttcaaattctagaaaagaaaacaaggctcaaggcagtgaacgaaactggccgcctgaggacactaggtgaggaagaggtagaactgagatttaaagctgatgattagtctctaagtgcatgtgtttttctgccttgttatgttacccatgatcagcgtctttgcatacattttcccaagatcctatgtgagtgcttagcctgtggtgatatgtaataaatatttaccgcataaggaagagaatggaacaaattgtttatctatccttacgactaatgatatacatggtatgactaaggcataagtgagtatgccaaaggtgacattatactctagagctatacctgccaggaagaatatctttttgattttgactgtgctgcttgccattctcacctctccaccagcctaggaaattgctgtacagttcttgactaccatgactcaagtgttccagaaagaactgaaatctttatatattagcttgtctgtctgtctgtctgtctgtctgtctgtctgtctatctatctatctacatgaatgactactgggaatgacttgcaggagtctgatctctcctcccactctgtgggttccaagggaatcaacagaaaggtaggattggtaataagtgcctttaaccacagagcaaatttccccagcacctcttttatttaaaaagttcaaaaaaacttttatttaaaggacttatcaataccatatatatatataaaacaattcaaattctttttctatttttttcattaaaatggaacaaattctggggatacactaagcagtcaaaatgactgccttctggaagggactggtatgtatactcctttcattgtgacctcagtctagacatagcatgtgttgacgttcactgtgttcctcctagacggggctgttctctgacagggatgttgtcttggtaggtagggctctatggaggctgtaacatatttttcttctaaaatgagtctcagaggcagcccaagacaccgtgttctggtgaggttataattttagaataataacctcaatattatatctcacgtgcatccttatgtgtttcatgttaaaactaggatttataaggattattagaaatgatttccacagtaatcatacaagtcatgggtattattgattttattttatagagagttatagaaactaatccatttgtctatggtcatataatgccaaagccaggaactagtttcatagctcctatacaggctgtatctttattgaacttggcttgatctttttttctatttttcaacaaacattttgaccacctgccatcatcaaggcactatattggtcctgtggatacaaacattgattaataaatgtggtttctatagccagaatgttcctcatttattaaaaggacagcattttggcacatcatcaaaataaagtgctaaagtaaactgatatatatgatagtcttgtaagaagtcttgcaaatgcttgcaattaaccttaaagtcatgaaaataggaattctaaatacaatatgaacacaagagcaaaatagtaaattatttatcattcaatcaacaaatattattttgagcatttgaaatatattggttggctattctaggtcttggggatagagatacaaacgagattcctgctatcttatactttacgtgttctatagtggagcatgtatataaacaaatgtttaaaaactttgcaacaaaaaagtagaataagaaacagattcttaatgctgatgctggaagaggaaatgatcgtacaatttgttcttctcagggacatctttcctcagagaagactgctataggccaaatggattccagctagctagaggatgaggatcagggatggtcaaaaaagtttctacagcaagccaaaaacccggacattcgtccatcataaagataccagaataacatcaggaggagaagaaaggagcctctggtgggacttgaagattataagtaggtcataccaaacatgctcttgagtagaggtattttaagaacatgagaagagacctgaagagatgtcttattttacaaaatgcttgacatgcaagcatgaggtcctgggtttggatgtccagcacctacatttcccttccagaaggcagcacctacatacatgtatgtgccagtacacctagagctggaaaggaaaagacaggaggattcctagagctcactagccagccagtcttgatgaattggtggtctccagatacagtggaagaacctgtatcaaagatgacaaagaagaagacaataaatgaaagtattgatttccaacttctacacacatgtgcagagggatgcacacccacatgtattcgtttcagctcagcacagaaattgtgttgataggaactaaaagtgtatctgaggaaaatctgtaaagaattattgaggttacaggctgggcatgatgaaatttgcactagagttgtagtaagaagagaacagaagcagatggatatcggatgccctcaggaagtaaaatggacaaaaatccactatacatggaatatgacccaggagaaaaaagtgtgaaagagccatactaaattcacatgataagatactttattgcacaattcattgaaatggggacattagaaacagataagatctgggaggcagatttgtgaattaaatttggaaatgtggggttgagaaacattgagagagacgagagatgaatcaagtcagcatttatctttgtctggatcttagaatggtaggtgggtctggcctgcagacaaaccttgtgtaatctccagtgtgcacatagtattgatgtcacgatcataggtgttattgtctagaaagatgctgagagtggataagcaaaatgagttgtaatcaagcctgagtgaactttaatctcacaacagtttgctcaacctaaaaatgagattggaagaatattgcccaatcatgaagtcatggaactgaaggaaagatgactggtggtaaggacaggatagccagcactgttaagtactgcttatacaatctgagtttgggagccagcagtgttaagtagtgcttagataatctgggtttgggacagccctttggaatgattgacatgaagtcatccggaacctcaccgagagctattttatgaagaagaaaaaaattgctttacagctgagtggagaataatcaaggactaagaaactagattaattgagcatagataaatgagtcctaggagaggacagtaaagattcaattgctaggaagtgggagcaaattggagagaccaatgataatggatggttagtgggagctcatgagaaggaggggcagaagaaagcgtttttcagagcatcctgggtctgtgtgcttagtatgggagaggtgtcttctcccagagcttatactcctccttaaagcaggaacagaatcttgtctgagggtgagatgggatcagtaaagtttgaatagagctaagagcatttgaaatattgttactgataatattactggagagaaagaaagcttgtgcagtcattggccagtgtggtgagcccatcctccaggaacctgtgaacacgcatactctctgtttaggctgtcactcaaacaattcggtctatgtgtacactgtaaaaaaacccaagtgcaaacaacagcccaacggcagggaatgcacaaggggctgggaatcttaaagattaaacattggtatttttttttctccctcagactgaggaatttggagaaaagacaggggaaaatatgaaaattaaacatgaatattgatatactcattaaataaacttgctgaatggcaagttccttttaatgtggagagatcgccttcatagctattgtttagcaatgtatcctgcattgagttaaacactgggggtaaatgaggctatcaggattggcacagaaaggtgcacaaaggttgcaggattcctctttgcccttgagccaccagtgtggttctctgcaatcttcctactcttcctattcacaccagaagatgaatgaatgttgccatgatctcacagttttgaaactagttcaacaaatggaatgtcaatttctaaggaatttctttttttttcttttttcttttcttttcttttttttgccaaggaagataggagatggacacctggagattaggaatgtgttactaatgactggaagcaattattttaatgagttgatctcagcttggctaataggcatcctctaagtgtgaaattttacattttacatcagatgtgtgggagggagtgtgatgagcattcaggagcacgtatctacttgattgtttcccttgaagcatttcttgtttgggtagggaaggtgcatgcctgttaaagtgttatcagaacatactaaaagtagctccccaaaatgcttatgtttagatgatctaagacacagagaaaatgagatgggagagacaacagagacaccccatagtgtatttaagagtaaaaagaatgccacaacaagagtacatttgagatctattaacttctaatatagttccaggagagtatggtaacttgcatagaggtttaaagatcttgacataaaagtaactaatttttacttacataagagtaagtgaatgtatgcatgcatacatgtgtgtggagtacatacatgtaagaattcatgtttgcatgtgtgtgtgtgtactgtgtgtgtgtgtgtgtatgaagacatgaggatttacaagtgtggatgcactatgtaggttcacccacattcatgtgtgtgaatgcactatgtgtggtggtgtggctgtgtgtatagagtacttgcaaatcagaattcatgtttgcatatgtgtggatacactgtatgtgcagatgtgggtaaggtcagaggttgttgtcatgtgtcttcctccattgctcttcaccttgtataccaaggcaatgtctcttacctgaacccagggcttaccaatttggctaggctcactagtcagcttgcttcagagaccctgcctccgcctctttagtgctgggattatagacagacccaactgccattttacacaaacactagatatctgaactgtagtcctcatgaaattatagtgtttcactaagtgggttatctcctcatttttgtagccaagttcttggaccataaattaatcatcaaagcctttataactacgaggctggctaggaagatgctgtgggcttgaatagctgtccggtgtctattattccccctggaactccatagagattcagtccttacatttcacttaatgttattaagtcttccatcctcacgtgagccattcttatttctacaagctgctgttaatgttttctcacacaccctcttctatcttggccaccataaaacaaatgttcttgtcttaaatcatttgtcttaaagtgatattccacagaatgcagcactctggacatgaacagtgctggtcaagtcagattattgttttctttgatctaatacttgtaaggtcaatgtagggtacatcattgaaaatacattgttcttaaaaactgatagcctaagctcatgaagaagagaacttaaagaagaaaatgggcttcatgacatcatttcaatatgacaggacgatgtctctttcttaactgacatgttaaagacaggaaaatgtcccacacagttaaagaccatccaagtgattttcatcaaagcacagactaaacttgagggggaaaaaaggtcgccactatttcacattaagtaatggatttaaattaaatcatatgtacaccaatcaaagccacattgaaattccttttaattgtaatattagtcagcccacatgttaaggtgccaatattatgttctgtccagtggccccagagttcttgatactctcatctagaagagagaaaaataacttttttctccctttctttttaaagtattatatatactttatcagtctcttgaaaaaagatataactgcaagcaaatataaattattagagcatcgattaaactactgaatttctaaagaaaagacctaacctgtctgccatctgatctaccaatatatgtgctcatttgaaacattcctcttctctccttctttccttctctcccttacttccttctttctttgctttgcatgtaggtgatgcatgtgtgtgtgtgtgtgtgtgtgtgtgtgtgtgtgtgtgtgtgtatagtgcatgcatatggtaacatgcatgtgtgtgtgaaaggactagaagtcactgttgggtatctttctcaattgctctccattttatttttgagactaggtttatcactgctgaacctgtagcttaccagtaactaaatagttcatcatgctcacacaacaagaacactgcctgatgaacattctctctgcccataatgttttgtccctttaagttttacattaaatatcaaggatttagggcccagtggtttctgcagcttttatttgtttatgattagatgcattgttaagagtagccactacgtttctgtaagtgtggctgttattggatattgaagttatagaaaacaattaattatacttaaagttcaaatctagctctctgatgcggctcctcccacaatcatctttgtgttttctcttgtccctgggttgtctctcagaggggagatgctgagggcataaacaacatttactggtctgggctttagcgactttttgatggattcattcataacaaaatgtaagtgttattaacagagtctcaccaagcacataaacaaaacagtgagagtgtctaggcagagagcgatatacttttagagagtaatatgtttatgctatataggaaagggggaagaaaccaaacaacacagagacaatataaataactttctacttgcttgttctatatcactttgctactattgacaaaaaaaagatttagccatagttatcactgagagaaagacaggaggatgctgtgggtggattgaccgcggtgtgacaggggagtttgttacacagataaaaagacataggctcaaagttgatctttagatttgattcccatcttagtcacagggcatttgttttgctgtttaaattatctttgtacctaggggagtaatgcttatgaaccctacagctgcagttttcttttctggcctttttcataatccataattatgaaccacgctgagctagggtgtgacattcattggagaatatcctaaatggcactttgaaaaaaatttggcctatgtggaatctttcagaagcaacctttcgtggggattctggttttcctttttagctgatgggccgataatctcataatggcattagtttcccaaccaattacccaagattgttattatgcgttttttaaacttggacagtctttaaatgtctacagcaaggtttaagacagatccagaaggatgtggattatagtcatttagaagtctgaaatccagggtatttggtatcttaaaattcaacaagggatgctgggggaaaaattttccaaatagagttaatttaaattcagcctctgaaaaggttatattatagaacatattgaaaaagagagaaggttagttaggaagtcaaatgcaatagaaattggaaatgaccaggcttttggttatgagcaatttcccatatgttacagaagaatgtgtctgctctcttcctctgaggttgtttgtgagaccatgtaccccattctattgtacgagccacactgaaggtctccattttaatggtatcatgcaagtcagtaacagcccatgaacagaaggacaattttctatgggttttcaccttctctctcatcagactttgactcattgaaggagggctctctttgtatgggcattgtaattgttttctctttgttaatctagtttgacatggcaccagtgccttatggagaggaggaggacagaaatggttcaatgtccaggtgaacagaggtgatgctcagggcataatgaatactttggagtgctgtttcatttgcaaatggctcgtctgtctcaacttagagttcagcttctggaccttggtcctctcactatgaccttaatttttgccaagcaggtacaagtccattttcttcgtggattttcttgactatacattctctaaagatctgaattgaaatgcacatacattgtgcatatgcaggtctctttttggtcatttatctttcagagcaggtaacaacatcacagcatttccattgttgacttttggccctttattgtcgagagtgacaaaatttcctgccatgcttttcctgggttatttaaagaaaaggaattgccctgggaattaataatttggcctctcattatttcaagtgtccacaacttttatctagttgagattttttttcttaaatatactcagattttacttaaatatttaatttaggtgtgtattaatttttaatttaattttatgttttcacttattccctttacacttccctcattcccagtcaccccctttcacaatccttcccccacccctccctcctcctctgagcaggtaaacccctggaaaaccctcaaactctggcacagcaagttgctatgaggctatgcactttgtctcccactgaggccagataaaatagcccagctagtagaacataccccacagacaggcaacagtttttgggatagtccccattctagatgttcaggacccacatgaaggtcaagctgcacatctgatacatatgtgtgggaaggcctaggtttagcctgtatatgttttgtggttggtgattcagaccccaagagacccaagagtccaggttagatgactctgttggtcttcctgaggagttcctatcaccttcgggacccaaaatccttcctctattcttccacatgagtccacaagctccatccacagtttggctgtaggagcctgtatctgtctaagtcagctgctgggtggagcctctcagaggacaacatgctcctgtttgcaagcacaacaaagtagcattactagtgttggggattgatgcttgaccacaagaccagagataagagaggtatctaagaatctagctataactcactaaattggggatatggaacttgaggaggcgacctcctgcagacagacaagaatcccagtgagcaatagaaacatcaatctacccacaaaactttcaaccccaaatttatcctgattacaagaagtggtttaattttaatatacaaagatatgagtggattttattttaaataatgtttaaaaaaatcttgaagaatttcgtatttttttttatcacattcagtgtctccttccaatttcttccagacccgtgtctccccatctctaccaagctacctacatccccattgtcaagtctagttggagctgcccaaatatttgtgaatgtgtggcctgctctggagtgtggacaatatgccacatgttatgtcactgaagaaaaattactttcccttctttagcaataatcaaattccaatagatcctcagatagaggtgggtcattgtcctcacatcccctcccctatgctgacatttttgtctagcttgagtttatacaggtctagtatatgctatcacagttgctatgggtttatatatacatctgctttgttgtgtctggaaaacagtttgcttgaagtcatccactacctctcgatcttacaatccttctgtccccattttcacatagctccctaggtcttgagggaatgtgtggactatagttatcccatttaggaacgagtatctgaagtctcttgttcattgcaagttggcaaattataggccactgtattagatactgtgtactggaagatgattctatgatgatggttgggtgatatactgttctacaggcacagctgtaagtcattagaaattcttttactggggctggagagatgggtcatcagttaagagcactgactgctcttccagaggtcctgagttcaattcccagcaaccacatggtggctcacaatcatctgtaataagttctgatgccctcttctggtgtgtctgaagacagctacagtgtacccatataaataaaagaaagaaagaaagaataaaaaagaaattcttttattgctatgcccatttagtagaatactagtgttatcttttctcctaaggcccatgacctatgtagctttaggttctggcctcattcacagtattgggtatggattacatctcctggaggagacattatatctaatttgaaaaaaaaaactgcttgattattcccaaacatttgtggcactactgtaccagcggtcatatcttgttaggcaggtcattgttgtagtttgagggcttcatgggcaggttaagtgatgattgccatcccatttccacagcatttactgcatttcccagcgttgtgtgtgtgagtcagtggggaagaagcctctgattgagttccagctagatttctccatattctatgactcaagtatgtgacgtcttcaataatacggcctcactgttgagttctgtaggttcatcactgttgttagtggtagtctgtaatgtttgaggggcaagggtctatggcatcccaatagccaacaacttcaaaaagaaagataaccattcctggtattaggctttttatctggtggtgtagttgggcccctaccctcatcctataataaggtaactctacttaacctctttttatatatgtatgcattttaggaagcttctatagaagtagacttctatatggcattttcaaatgtcctttaatatcacttctatttcctcctacatccttcctgctctgtgtccctcttctttctttgttacattatattctatgtcatctttcttgaaagaatcattcctccgccaaggacttttatcaattatctgacttctgtggatattgtcatcgcagtaagaatgccctagataaaaagcaagcaagcaagcaaataaaccaaaccaaaacaagacgcctaacaacagatgctggtgagggtgtgaggaaaggggaacacttgtgtacttccggtaggagtgcaacctggtaaagtacccatgggatctctgttacctcatagctgggaattgattttccacaaggtgcagctacatcagttggaagggacatactcaaaagactctctctgtatcttattacagagatactcacccatccatgatcactgttgctttattgataataaccagaaattagaaacaaactaaatgtccatcaactgatgaataaataataaaaatgtggtatatttacataatcagaatattattcagctgttaagaaaatatgaaatgggggtttggggatttagctcagtggtagagtacttgcctagcaagccccgggttcagtccttagcactggggaaaaaaaagacaaagaaaatatgaaatgtgtaggtaaatagatggaaccagaaacaatcatcttaggtgagggatcccagagccagaaagaaaagtgtcacatgcctctcttatatgtaaatgctatgttttaagccttagatattgtgtttcatttgagatgagtacaattttgaataaaataattatcagatttatcaccaggtacataaaagatatctaaaatgaattaagtgactgctcatggcttatttatattgtaatgttgtagaatatagtataatttcaaatgaatatacttcttaaaccacctctgtattgttttgttggtttttctaaaagcctttccttggttttctgctatgtatgtaaactagtgtatgctggcttttggttcctcatgggacagttgtgttaatgaacattttcctaagttgtagcctctgtaccattttgccattttgttcagaaaggctttacacactcgtcttctgtatgtttaatcttgtttctacatttggtggttacttgcatcatcattttcaataaaatttgtatcattctttcctatttagccttgcagagttttgcttattttatcgtacctttttcttgttttcatttttttctaactcatttctccttcctcccgtagagttattttattgatcttttcctagctcattaaacaaaaacctagtttctgttttattttctttcttaagcaatgtcgtaatttttcattgttttattgattcacgccactgaattttctttgggtttcgctattgagcctttcaagcttattgagttgatttttttttaattattcattttctaaaagcaacaagaaggctcaatgctgagacctccctccagatctgccgttttgcctcacggcttttataagcatctgctgcttatgttcacatttgaaaaagttcatgctatagttttcatttttttctctaatctagcacgaatgcatactatattttggaggtttccattgtgtttttattgaaaaataatatcttctgatatatcttacaaacttcatttgtgggcaaatgaatgatctgtgcacattttctacacctgctccattgagattctatatgtaatttacttgttgacctgaagtaagattaaaaaaacattgttaggctggtaaactatggctaaaagaagaattcctgctcaaattgaagggttatatgcaatataggcatagaaggattgatactgtaggaagtggtacagtaatttagatgtactctgcagctgcatgctctgtcagcttgctaatcacatccataaccatgagtcactgttggagtgggcttcacactggaacatcctgaagatgtttccttttcgtaaacagcaaattaactgtacattgaagctgtattgtgttcagatttctgtaagaaattcttatttgaggcatagcctgtataagcagctgtgaatagaaatcctattttatgaagtagaattttttttagcttcttctatgaagacaaacccaatggtttctggttggaataatattagcaatcttgttgtaaggtgtttctcaggaattaggatattgtctttatcatgcatttggaggtataaacacatgttggctcattttctccaggagatttagtttaaaacatttgaggaagaggttagggcagggctcatttatatcttatttgatcattataacagcatttggaatttactaatttccactcaaacacttaattttgtttacatttagagagtttcaggtactgtttactcctgctaaccatttctattcataatgactctcagacactcgcccacatttctcacctgtcgctctcatttatttctccgcctcggtctatatccttatatctaatatgtaacatacttcaggcaatatgagctgttaaagtaactgatgagaaaaagttgctttgaaatccatattgcgttttatcaacatacaaaagatctgaaaatcagaaagagctatcattcactgatatcccaagcttactcaatagctgaaaacttcagaatgcctgaacatatggcaaatagattacacagtattggttcatcatacagttcgcagtaatgacagtggtgtgtgtgtgtgtgtgtgtgtgtgtgtgtgcgcgcgcactcgtgtgtgtggttcttttaagaagtaaacttaactgagtcattttttcacacagtagtttccacaggaggtaaggaacctcttctgctctatctgtacaggaaaaaaaaaaaaccaacccaagaaacaaatagtggaaatgaaatgaagatcactgtcattctgtgatatctttgattcacttgaagagtttagaagcctgagaatgccttcttgtctggttaaggttttaggagtcctgagtttgattgttcctcatccacagaagcacttagcagctattcagtctctgaagtggtcagaatggccgtatcttctaaagactcatacactaaagtgttcattctccaagttggtggtattaggagatgagacctttggatggggattaggtcatgagaatgaagccatcacaggtggaattggtacccttataaagaagcaccaagagattagttgagtttcctgaacttaatacaacaccagctactggtttgccgtggatagcctttagtctcctcagggattttgtaatgattgggtactggatttggtcaaaggcttttctgcatcggctgagatgattgtgtcatttctgtccttaggtctatttatgtagtagattgcatttattcgtatttaagcatcctaccctggaccctccttattactgagtttaggcctgtgtgttgcagcatgattatcctgcacattatgaccagtctccacttataaatgggtacataacatgtgaatctttctcagtctggattacctcattcaggatgacatcttcccaattccatccatctgcctgacagtttcatgtcattgttttttagtagctgtgtagtattccattgtataaatgtaccatgttttttatccattctgtaattgaggagcacatgagttcttaagattttaaataccaacaaaccaaataaccgaattaataatggagtacagagctaaatatagaattctcaatagaggggtctctaatggcagacaagcacttaaagaattgttaaacgtccttagtcattagagaaatctaaaacaactctgagatttcatcttacacatgtcagaatggctaaaaaaaaaaaaatcaagtgacagctcttgacaggaggatgtggagcaagggcaacactcttccatttctggtgggagcacaaacttatataaccactttgggaatcaatctggtggtttctcagaaaattaggagttgttgtacctcaggaagcagctataccactcctgtgcatatacccaaaagacgctccactgtactaccagcacatttgctccaatgtgttccattgtctgagggcatagtgagaagaagccctccccagactccaaatttattgaacctttgatcactatactccagaactgtgaaaataaactcttgctactcatgagctcccaagtttatggaatttttctacagcaatccaaatagattcaggcatccctcccaatagtcagaaaggtctaaatagtttaattaagtagttgacatgtaaagatacatgacttatctcagggaaccaccccacctaaacatctctctctctagtgaagttagaattttttgtgtctatgcctgaccaaggtcaatttaacttagtgcttctcaaatggggacagttttgaccatatgaacattaggcggtgtctagagagatttttgcttataacatctgggaaaagactggcaggtaatttttggcatatgaatagacaaatgggtaaaggaaacagagtccagaaatatatacacattatatagtaatttaattttttaagatggcaaagtaatcaaatgaagtaatggaaagctgagttagtacatgatgctaacgtaagttaatatacatatggaaaaattgaatcttcacctccaagttcatatcacaagggaaaattaattcacactagaagctcaattaaaaattaaaatatgacttgaagaaaatgtggaacacacactcatttaaattagtgataggccaagatgttttgaacaggatattgaaaataattatataggctaagaaattagattgctcattaataggcatgactaaactaatgagtaagcaagcaacagagggagttgcaagatttgcaaagtacatctgacaaaggagtgagtcagttttaagtaaagaattctacacagaataagaaaaagacctctctaccaacttcagtaaaaataaagggtttcaatagacacttcacagatgtccagtgaacacagcaaggaatgtcagcaccatcattctttggggaatttcattgacaactacaataagaaagtaatgtgcacacaccagaaaggccggcattaaagattgataacacaaaatgctcacaagaagacagaactagtgcacacttaactggaaaaaatctcacatacttatcaaaaagacagcatgtaaacagaatttgtcactcctgtatgctgtaatgtaatctatggaaatgaacctctggttcatgtggcaatgtggataaattccacaggactaatgctgggttaaagaatgaaggaaaagtcctaacgtgccttgtgagattccatttccaggaagttccaaaacaaaaataacacaacattaaaagaaaaaaaatacaattgcttttaggaaggaagattgactagaagagcatattacagaacatggaaacattgcacttcatagtatagccctgagcgatctgtgtatgcccattggtcaaaacagtggcagtaggctttatgcacttttctgcatgtaaatttatagaaaatactcttaagacattaggagaaggaggaggaaaaggaggaggggaagaagaagaagaaggagaagaaggagaaggagaaggaagaagaagaagaaggaggaggaggaggaggaggaggaggaagaagaagaacaaggaggaggaggaggaagaggaagaagaagaagaagtaatagtagtagttgttgttttgtggtagaaaatagagttcatcttatacaagtaataacatgtttaactctaagtaatgaatggaaatgtgattaatagcaattctgctagacacagtatttttaagataactgaagaagctttaaaaatatgtgtgtggctttaaaatgtctcttagagaactacattgatacaacctagattatttccaaggttgactctcactgtagaaaggcatcaggaatcacctgtcactaaatgcaagtcacattgatttatattaataagccctgagtacatgtttggtatctatcctttcctccctccttctttccttcctttctgatttatttgaataactctttctttcgtctggagctaacttgtatttggatttcaatgtcattaatgacccaaagcactgtactaacacacttttaatataatcatataataaaatgagtcaggtatcatttcaagataaggtattgtaggtaaactgatagtttgtgttaggacgctattcagtccctcttcagtaagaatagtttagaaagtagctatcatctcttcggataagaaatagaaaaaggaactagtagtcttcaaaatgaatatgatggaaaaaatacactaacaggagaaaagttccctacaatcacaaggaagctattgatttcttctgcatacatgtcaaagatccctctcatgtttggccaagtcacaacataggctagtccacttataatttgttctattttccaaggacatcattatgaaaactaatcttaggactgagaacaattgaagaattttcagttgctttatgttgttgaacagtttgcttttctagtttttttgtttgtttgtttgtttgtttgttgtttttgatacacaatctctctgggtagtgcagtctggtcttgagcttggaatatttctgctttcacctttgtagttgctgagataacaggtgaggaccactggacctctgcatattccctggcaatactagtctttagtatctttaggaatgaggagaacttttactgactgcttccccctctcctgcttttctggaataaatcataaactgcagactttgttgaaatggatttcttgattctaattcagaattaaattactgttgagtgagtttagacttattacttgggaaagatcttacacttggatttttaatgtcattgacttttctggaggcctatataaattcattgtatgtaaatttacattgtaaagaagagtgaaggtgttgtgctagagaatcctgacaaagtttgtgcagacgtgtttcccacatggtttctcctcatgctgcattgtctctcagcccaagagttcatcagtaaagatttgtggcacaattacagaagcacagtctgtttccaaacatactgagctcatctcctatgtgctacaggatgcattgaaagtcgtatgttttcaatgtgtaaatgagtagtcagtgtacattgaagatgggcttaacttagttgtaccatatttagaatctcataatcctcagatactgtgagtcgatctatctatctatctatctatctatctatctatctatctatctatctatcatctatctatctgtgtgtgtgtgtttgtaagatttccccctttatccgttagtagacatctaggctgatttcataatcttagtgtgaaatacttgtttgtgttagacacatgtagacatgtagaggtcagaaattgatattgtaatgtcttccttaactctctctctctctctgtctctctctatctcaatctctctgtctctctctctgtctctctgtctctgtctgtcttgtctctctgtctctctctgtctctctgtctctctctgtctctctgtctctgtttctctgtctctctttctgtctctctgtctctctctctgtttctctctctgtgtctgtctttctctctctgtgtctctctctctgtctctctgtctgtctctctgtctctctcactgtttctctctctctctgtctgtctgtctgtttctgtctgtctgtctctctgtctctctctgtctctctgtctctctgtctctctctctctctgtctctgtctctctgtctctctgtctctctctctgtctctctctctgtctctctgtctctctgtctctctcactgtttctctctctctgtctctctgtctgtctgtctctgtctgtttctctctctctctgtctctctgtctgtctgtctctgtctgtctgtcttctctctgtctgtctctgtctctctctctctgtctctctgtctctctctctctgtctctctctctctcttgtgtatgtgactatacctgaagttcactgttttagctacacttcttgcctagtgggggcaggggtctgcttatctccatttccatctgttgaggttacagatctaggttcccatgcctgacttttctgtgggtactaagcagcctgatcagaccctcatggttgtgtggcagactctttactcactgagtcatttccgtggactgtgaatcaaacttaaggaatgcaacgtgacattttgttctggtgcatagcattgttagagaatgatgaacactttattttttaaataataatttttatttattagacagtaattttgtcttaacgatattatagaatgtggttatctatgtatatacatgaatagtgcacttctgtgtgggcacacatgcgcacacacacatgcacacaccaataacctaaaatgtgaagtactgatttttcacttactctttgattttaaatgttttctgtgtgactgaaggactctataatatgtcacatttcttcaatattagtgatttctctgtactttatatagttggttagttggcatctggatgtacactttcttttttttaatttgaagttggaattacttaaaatagatgaccagctgtgaaaatgcagatcagagacctttctactatattcagcataagcatgtttggcccattgtttgcttgttagacatacatattataattttacttttcttatttataagtgaatctcattgtttaaatttgcattttggaataactagtaagattaaaatttaaacactcatctccccaggacctgcttgtgccattatttttggttatttgatttaggattttcttaactattagaatcacctccttttctgatgcatcttattctaatgtgtagcttttatatttatcacttaggtatgtgtttgacttcaccataaaacagtaaaatatagaagaaatgggcatcatttgatactattttatagaaaaaaaccctccggacaagaagcaggtgtgtttccttcataggaaacactattcatagtgtgacatataatctttgacatacagttggttttattcctgctgtgtcattgctttcaaactgtggtgaagagaagttaacctgcttcccgccagcctgagactgtccagcactggaagcaatattatcagttctgaatctccatgtcaagatggcttgtggcaatggaaagaggctgaaaccatgcctaggtcattgctcattaaagatgttctttggaccaagagaaaccaagaaaaggatgctaagtcccatcccttcgaggcagcacagaacattctgtccttacagaaataactggagctctgtcttgctgttagagcatttactattcatctgtttgtatttgtgcttgtcttgttttcttagaaacagtggatatatttggaaaagaacattttttatatagatattttctttatttacatttcaaatgttatccgctttcctagtttcccctctgaaaatcccctattgcctcccccctccccctgctcaccaacccactcactcctgcttccaggccctggcattcccctatactggggcatagaaccttcacaggaccaagggcctctcctcccattgatgactgactaggccattctctgctacatatgcagttagagctatgagttcatgtgctttctttgattggtagtttagtcccagggagctctgggtgtactggttagttcatattgttccgcctatgggactgccaaccccttcagttccttgggtcctttctctagctccttccttggggaccctgtggtctgtccaatggatagctgtgagcaaccacttctgtatttgtcaggcactggcagagcctctcaggagacagctgtatcaggctcctgtcagcaagctcttgttggtatctacaatagtgtctggaattggtggtaatttataggatggatccctaggtggcacagtctctggatagtcattacttcagtctctgctctgaactttgtctctgtatatcctcccatgggtattttgttcccccttctaaaaaagatcgaagtatccatactttggtcttccttcttcttgagtttcatgtgctttgcaaattttatcttgggtactctgagcttctgggctaatatctactcatcagtgagtgcatattatgtgtgttcttttgtgattgggttacctcactcagtatgatatcctccagatccatccatttgtctaagaatttcataaattcattgtttttaatagctgagtagtactccattgtgtaaatgtaccacattttctgtatccattcctctgttgaggggcatctgggttctttccagcttctggctattataaataaggctgctatgaacatagtggagcatgtgaccttattacatgttggagcgtcttctgggtatatgcccaggagtgctattgctggatcttctcgtagtactatgacaaattttctgaggaactgccaaactgatttccagagtggttgtaccagcttgcaatcccaccagcaatggaggagtgttcctctttctccacttcctcaccaacactctgctctcaccagtttttgatcttagccattctgactggtgtgaggtggaatctcagggttgttttgatttgcatttccctgatgactaaggatgttgaacattttttaggttcttctgagccatttggtatttctcagttgagaattctttgtttagttctgtaccccattttatgatagggttatttggttttctggagcctaacttcttgacttcttcatatatatttgatattagccctctatcagatttaggattggtaaagatcttttctcaatctgttggttgcctttttgtcttattgacagtgtcctttgccttacagaagctttgcaattttatgaggctccatttgttaattcttgatcttacagcacaagtcattgctgttctgtttaggattttttccccttgtgcccatatatttgaggctcttccccactttcacctttataagtttcagtgtctctggttttatgtggagttccttgatccacttagacttgagctttttacaaggagatagaaatggatcaattcacattcttctacatgctaatcaccagtcgagccagcaccatttgttaaaaatgctcttttttcccactggctggttttagccccttcatcaaagatcaagtgaccatagatgtttggattcatttatgggtcttcaattctattccattgatctacctatatgtcactgtaccaatgctaagcagtttttatcacaattgctctgtaatacagcttgaggtcagggatggtgattccaccagatgttcttttattgttgagaatagtttttgctatcctatgttttttgttattccagatgaatttgcaaattgccctttctaactcagtgaagaattgagttggaattttgatggggattgcattttatctgtaggttgcttttggcaagatagccatttttactatattaatcctgtcaatccatgagcatgggagatctttccatcttctgagatcttcttccatttctttcttctgagacttgaagttcttattatacagatctttcgcttccttagtgagagtcacactacagtattttatattatttgtgactattgtgaagggtgttgtttccctaatttctttctcagcctgtttattctttgtgtagagaaaggccactgatttgtttgagttaattttatatccagcaactgcactgaagtttatcaggtttgtgagttctctggtggaatttttgaggtcacttatatatactatcatatcatctgcaaatagtgatattttgacttcttcctttccaatttatccctttgatctctttttgttgtctaattcctctggctaggacttcaagtactatattgaataggtagggagaaagtgagcagccttgtctactccctgattttagtgtgattgctttgagtttctctccatttagtttgatgttgcctactggtttgctgtagattgcttttattatgtttaggtatgggccttgaattcctgatctttccaagacttttatcatgaaggggtgttggattttgtcaaatgctttcccagcatctaatgagatgatcatgtgttttttgtctttgagtttgtttatattgtggattatattgatggattgctgtatattgtaccatccctgcatctctgggatgaagtctacttgatcattttgatgtgttcttggatttggtttgcgagaattttattgagtatttttgcatcgatattcataagagaaattggtatgaagttctctttctttgttgggtctttctgtggtttaggtatcagagtaattgtggcttcatagaatgaattgggtagagtaccttctggggaaagaatatttaatcatcattattctttggctttttccgtgtacacaaacttccttaccatttgttatatactaatattttcccctaagtatgtcgtatcacttttaaagatcaattcatttcataatgataaagcaatatgccctgccagcatttcactttgaaattttggtgaatgttaatttcatttccttctttgtgccttttgtcttcttgagaccatgaggttgtacctcattataccttatgccttaccatcttttgtttctcacgtgactccttcatgcccttagtctttctgttttcctattattatgatctcacattctctcaactcaccacaatcagctacaatattaaagggctggacatatattctgtatattcatatactttgtatgatggccactagtgggtgttgctcctagtctcatacatatatgggcaaatgttgatctttttgctatttagcatttgtctttctattatctaaacattttgattccttattagtcaatgactaaaggtcataaaatgaccatttttcccagaaagtactgagagcattggtatattattaacctatctaatttagcaattcaggaaaaatcaattcaacagcatgagatgaaatatagtcaataaaattgtgactcactctacagtgatttaaaaagagaaagactggatacatcagtctggcccatttttagctggggttttcctaattccttttgaggccatggaaatttctattaaaatggaaataatcacacatttaattgcagttccaaaaatttgcattcttggataaaactggcttaagccctgtcctaccatttctgtaattgcagtactgcctactgttaatttgcattttaattaagcttcaaacatttaactagaggatggtccaatagaaaatcctataatgatttcagtaattggtaggcaagaggtttttttttctatatatatatatatatatatatatatatatatatatatatatatatatatatatatatatattgctattttagcagagagaaatctgcccagcatgggtggggaaatgctgataaccttcaaaccaggctttttactttgggactgtgatgagaagaacttgagtcaggaatggagcaatgagaagagattgatatcgagggacctcagtgatatcaaggatcactcacattattgaaatttatgctcaaacctctcaccatttggggcaaagtgtcttatttttcccttttttttttcttttttgaactccctaagatacatttaattcagatatacaagacctgacatttgtgattttatgtcttcaaggcctgatagaagcagcctatagtggttttgttgctaactcacagatgtaaatgttaagaacattttcctaatctatttcctttaaactactttggggagggtcatgaaagtaagatggcctactctaaagtaagatggccgactctcaagtaagatggccaattctcaaatgatctgcacttagaagaaccttctttaaaactttgccccttcttagaattgggaacaaaacacccatggaaggagttacagagacaaagtttggagctgagacgaaaggatggaccatctagagactgccacacccagggatccatcccataatcagccttcaaacactgacaccactgcatacgccagcaagattttgctgaaaggaccctgttatagctgtctcttgtgagtctatgacagtgcctggcaaatacagaagtggatgctcacagtcagctattggatggaacacagggcccccaatggaggagctagagaaagtaccgaaggatctaaaggggtctacaaccctataggtggaacaacaatatgaactaaccagccctctagagctcatgtctctagctgcatatgtagaagaagatggcctagtcagccatcattgggaagagaggcccgttggtcttacaaactttacatgtcccagtacaggggaatagcagggccaagaagtgggagtggatgggtaggggagtggggcagggggagggtgtgggggattttcagtatagcatttgaaatgtaaatgaagaaaatacctaataaaaaattggaaaaaaaaaaaaaacaacccttggaaacagagtgcttgtgtcttcaacatgatccaggaggagagtttagtgggcacagcaggtgtttattcaaatataattacacatgtttcttctgtggtgagtcagtatgtatagtttatgatgaaattaacagtctataatgtggttctgtagaaggaattctcagaaatacaaggcacaaatgtcacaggtagtggagctgaagtgctaaagccaaacagccttaccccaactcaatctctgatgtacttgttaggatcatggtcatagtgtcggtaataaaaccagcctgatccaggagtcagcaaagctgcctgtgttctctggaggaaacctgactaattgtgaatgaaagtgttcgaaccacagtatgatcagacaccatctgtagaatatctagggtggttcttaaacttttcaaagcaagcttttctgagtgatgatcggtttttaaatgtctgatcacaccaggattttcccataagataaactgcccagttatgtacaaagttcatcagagtcagtaaactttgtgtgtggattcccagttcacttgtttttagctcagattttacttgtgttcagccatgagctaaaaatcaccatctgtccattttattttatcttgttttgttttggcatgtgtagctatatgaagggctaatcaaagagacacagaaacttcttgggggagaaaatgatatttgcaatttgaatctagaaatcttctacttagcaccaagtgatactaataggcatgtaacagattttgaggccataggtagatagatgctgactaccatgctgggagtaaatgatcatttaaacttttacagtaggtgtttggtgttagatcatatattgaggaagaatcataaatacacacactcggtgatattatccaggaagaatgtgacactgaggaaagccatgcctaaagatctcagggagaaaatacacggaccagctagtgttagtgtagtcttacatgcccactgtatgcaaaatcagtacagtttagagcaagccaaaagttggcaaggctaagacaatactttgtctttcagaatcttccaatcagttcaggaaacatgatgctatttaaacattttagttagctccaggtacagcaaaatccttgttaaataagtaaatggatagatactccctgagagttcaggggcatctcagaggagctatttgcatcaaatgcttacttttgtgcagaagttcatacataaaagcaaggctatacagcagtcaaaagttttaaggggcctgtgtccaatgaggactagagacatctgatttaagaacttagccattagaaatctaagggatatgacttagaaaaaaatatatataaaaagactaagaatgttaaggtgagggaggtaatatattgtaagaaagatataatttcagcagcattggatgtttatattaaaaaatatgactgtatgtgcatgtaaaaattgtgtgtgtgtgtgtgtgtgtgtgtgtgtgtaagaactgtgttctattttggcttaaaaatgtattgttttgaattttgtgtttactgatgcatttctacgtgccaagccttaaactaagtgctagatacatggaatatccacgaacttcaatcgatttttttatcttcacaaagctttggggtagtagaagagataggagcagtagttctctgagacctccagggggtgcctcttctacacagcagcacctagtggtggcgttcatctctggcatcctcaacccaaatgatgactgagtggactgcatatctgtcagagaatccatttgctcacagagcgttaatattttactctgtgttacaggtagactttctcttagatatagagtttctgacagccataaatctggctcttagtattcttggtgtctaaaatagcaccttgcacatagagcaggcacttaggaccaacttttgggattcacctaaaatgtttgcttgatggaaaaataaaacatgtctcacagacagctgtggctatcaaggtgtcccgagcctccttagctactcacttagaacctttatagttgggccatgtggttgaggcctatggcggaggcagcttacaattcatttttgaattatgaaaatttggctggcattctataatgtctaacccttctgtgggtaaacttttttcttattagttagagctaaatatccaaaagctagtttgttacttaaaagtatttgtcacaaagtcaccgtttgctccagccccacgttcaatttttttgctcattcctacctaacaccaagtcaatattcagaattgcttaggagccttcttatttacctcagcggtaaaccccattacctttttaagtgattgtggagctgaagcaaatggtccgtgaagcatattaacaaaactgaaggcaaacatctcatgcttaaatagatgccatgacagtcagcgtaacgggctggaatttcatatatacctagtgaggaatcacacctcatacccatatcgtatcatcctgtggatgccacaaggatatcaagggcagatgttctgcgtacatcttacttcagctaggaatgtatgagaattttcaaacaagtatctctctgtggagaacaagggccttgggcagatgcagtaaaaggagctccagagtggcttcatttctcgtcgcgggtggtctttggggacgttagttctttacacaccagcacttaggtatcaaaaattgcttgtcatgtttcatgggaatgcatagccatataggtctccctcgagtgggtatacctttcccatgtcactatagagacagagttgttcttcaacttctcgagcactttctactgtacattaaacagatgtgtttcctgaggcattggtctgagttcatggtgatcaggggttatatgggcgccctgtttcctgaaagctccagtcatcgtagtcacacagacacgagctagttctctgcagtgtttaatcagggacaacgaacatcccccgtgcctcttgcctgagcactgtaaaagtatattaaaaaaaaaaaaaaaaaaaacaggattcctgcatcccaggtcctgatgagtgtgtctgaatccattttttcaagcagagtttggccatctgcttttcttggaaagagttattcccttgtcaacatttgtacacagagaaggaaggggagttcttaaggctctcttactatgatctatccttgatgagcttgggaaagtgtaggcagtgctttacttcatgcttttgaatggtggtcagtctacctattgcttttttctcaccctggtagtgttacatgtatctaattatctaattagttatttaaaactcttcctctgctacccactgccccaccctagtgccttattttcctaaactctgttctcttcttcttaagctccaaaatgtactttttaacttttttttttgacaattccatatatgagcactgtatttacatcatttgcctccctctctccttttcaactcctcccatgtacccccgatctttttcaaattcacaatcggctggtgtcctggtcctctggctctaatattctttcttcttccttttctaaataagcagggctctcaaaaaaaaatagcagaactccttctatctattgttcttttaccatctgaatgctaagcaggcagatcttgctcttctgcacattcagaaagcggttcttcagtacatctgggccattgtggttcctcttctgctgatgcacatttacaggaccgccaagtacagctctacctgctcttaaattacataaagtactttattatcatataaactaaagtgacacacacaaattaagaagaagcattcttatgaaaactagagagcatgttactcaggttttctcaagaatagttgttgaagtagctgtgagtggccagtcacagaacaccgaggtagtattaaaagaaagaaaaaaatggcaagctctgattgcctctcaagtgtcttacttctcatttcagaagaggcaaagtgcaatcgtagatgatgtgcagtggatgtgccttatattagatgctattgaaatccaattggagattcacactcaaagcaagggcgtggcctcgaatcaagtgtgtaggaaactacatccaattaaatgtttggacagctagacctgaaagggactctcaaggctgtcttactgtgatccttctttgatgaggttgggcagttgtgaacagcacatcatcccatgtacttgggtggcagtgaagtacggctggtagtcatgattctaaaggatagataaggtatgtgttttgaagattccacatctccatttgtttaataaactagccatctgcttactaaaaaagaagagttctgaccgaggctacatttcaagccactagctcttcttttaggcaaggaaaattgagaaaaacattagaaattcatggagtcctgatgcccgaatgatggagaaagctcatcagcttacaccttggtgtgaactaaggaaagaagctcccataagtgcaggaacaaaggcatggatgggcatgatagcttattatcataaggtcttggagaaatgtcaggaaagccttgcaacattttatacctgtgcagaaagttttctcagaaactgctgaccccaaagataatctcgttatgaagaagcatctcacagcagaaatataatctcattatggagaagcatctagcagcagaaatatgggttactgtactttttcattattacatgcgcgaagcatcaatgagatcctcaaatttcctcgagagcaggtaatagtctccttgatagcttgaatcctaactggcaatgtatctgaaacaggtgctgagtacccatagaataatgacatgttcccaaatggcttctttgcataacaattgaagcagaaatagctcacctgtgagagtttgttgaattgtatctcccctttccatttattgagctccctattgtagtgagcgctgagtatactatcatgctaacatatgactgttttgtattcattcatttctcacaactgaagatgaggcaggtttgctttggcaatgaacttggcttggtgtttgtgagatttccacaatcctactcctgaccagcaatttcatttttctatgagaggttgttgacagactttcttttaccccctttacactcagcaacagcccagagttgaactgatgagacagtctggctccctttgtgaaatttggtgcagaccccaggccctgctgtgatagaaacccatcaagcccaatattttatgtctttttccatattgtagctcccatgaggtaaggtgttaagctacattaagcccataaagagaaatttgagtccatgatgtgtaactttccccgaactgtaattagcataatctgcttctagaattttctaactgatacttgaagaaaagaagttatcagttctctaacttataattagtgtttaacataaaaactttttagaactctcagtacctcttatgaaactttgtaagaggctctaattgtatgcaagattatatcaaatgacggggaagcagacagctcgtgaagctaagaacataaatataatttctagcattgataggaaaagcttattttgaatttcaaagtatgagtaaaaactgaagttgaaatttgttgcacgacaaagatatctgagaagtttcctgcaaatgtagacactaagcattgcatttaaagagctcttatgtgctaggttgaattatggtcctaagggagatagacctatggcctaacacttggcacctttgaatatgacctccttagcaagggatcgttgcataaataatgaaaatcttaacctgagacagaacccagattgcatggatgggtcctaaattcaggaaaaacatctttgaaaaggaaagaagaggagacataacatctgaggagaagatcacctgggtgtagacactgaaactggagttgtaactgaagtcactgcacgctgcactgtaccaggagcagaggaacgatgctttagagccttggcactagacccagacccatataaaaataaagtgttacattaagccatcagcttgtgatcaattgtctcacacccactggaaaccagaacactatgggtcaaagaacaaatgaaaaggaaaaattcaaccaaatgtaagttcgtgaacagaagaacaagttttgttgcttactaatgagtcaggatctagggcaatttcttgacactaagtgtctgtataaggaggaagagacatctgcaattcaacctcacattatatattaagaaactagcagagaagctggagagatggctcagccattaaagactaggctcgcaaccaagaaactagcagagaagaccaaagcaagctcagaaataaacagaagaaaggaaatctggagtttaaaggagagaacagaaacgtaaaagaaaaaaaatgagtaaattattgaaaacaaaggttgattgcttgagaaaaatcaatagtacagacaaactagcagaaacggactgatctaggccaggatgggggaggccagagatgaaaagaaagggggagaagaggatgagaggacatggaaagtggtgtcagtagagatggcaaagctggggagggactgaggaggcatgggggtacaggatcccaggggagttggtttatttcttgactgtccctccccatccccaggatccagggggctcctgccttacctccagggaaagtcttgtttgtctctgggttagggtacagcctccctcatacaagacagcatgtaatttaacatcttcaccagttcagcagccttggccttatcctcaccaccaacaagtttgtgcttctcactaggctgcagagaaaaacactgcaagaatggggactcccccttctagcatcgattcctcctcttctgggatttagttcatttaggtttctttttatgtatgtatgtacgtatgtatgtatgtatgtatgtatgtatgtatgtatgtatttttatttgatattttcttcatttacatttcaaatgctatcccggaagtaccctataccctcccccccaccctgctcccctatccacccactcccacttcttggccctgacgttcccctgtactggggcatataaagtttgcaagaccaaggggcctctcttcccaatgatggccaactaggccatcttatgctacatatgcagctaggcacatgagttttgggggtactggttagttcttattgttgctccacctatagggttgcagacccctagagctcttggatactttctctagctcctaattgggggccctgtgttccatcctatagatgactgtgagcatccacttctgtatttgccaggcactggcaaagcctaacaggagacagctatatcagggtcttttcaacaaaattttgctggcgtatgcaataatgtctgggtttggaggctgattatgggatggacccccgggtggggcagcctctggatggtccatcctttcatctgagctccaaactttgtctctgcaactccatccatgcataatttattccttattctagggaggaatgaagtatctatgagttggtcttccttcttgattttcttgtgttttggaagttgtatcttgggcattctaggtttctgggctaatatccacttatcagtgagtgcatatcatgtgacttcttttgtgattgggttacctcactcaggatgatatcctccagatacattgatttgcccaagaaattcataaattcattgtttttaatagctgattagtactccattgtgtaaatgtaccacattttctgtatccattcctctgttgagggacatctgggttctttccagcttctggctattataaataggtttgctatgaacatagtggagcatatgtccttattaccagttggaacatcttggtatatgcccaggagaggtattgctggatctaccagtactactatgtccagttttctgaggaactgacaaactgacttccagagtggttgtacaagcttgcaatcccaccagcaatggaggagtgttccactttctccattgccagcatctgctgtcacctgaatttttgatcctagccattcttactggtgtgaggtggaatctcagggttgttttgatttgcatttccctgatgattaaggatgttgaacattttttcaagtgcttctcagcccttctgtattcctcagttgagaattctttgtttagctctgtaccccatttttaatggggttatttgaatttctggagttccgcttcttgagcaatttgtatatattggatattagccccctattagatttaggattggaaaaaattctttcccaatctgttggtgatctttttgtcttattgacagtatcttttgccctccagaagctttgaaattttatgaggtctcatttgctgattcttgatcttacagcacaggccattgctgttctgtttaggaattttcccctgtgcccatatcttcgagggttttccccactttctcctctataaatttcagtgtctatgctgcagaccctctgggcccctttgtctgcgtggaacgggtctctagtctcgggtggacaaagcgtaggttgaattgacagacagacgcacacaggagaggtctgtggaatctgaatgtatttttcaaatcaagcatcagactttttatgcagaagacaataaggaagttgggtgacaaacccgcaaggtacaaatgaggtaaccggatgcttaatgactcttatacagaacagaggaatgaaaacgcaaagactggcaggaactgggcaataaaataactgagacaaagtcagctctgtctaaggtcagctatagtcttagaagccaggtgtgaggtctttactttcctagggcaagggctttcacacccgagtcatggttctaactagggagttcttttctagctaaccatctcatgaataatgcaatactctaaaaccacagcccaatctacttcctaaaccattgtaaattcctgtatatgggtgtaactcagctatatttctaagtatctattctggtttctcctatggtcagaaacttctttcttccttggtgatggtagattcctgtgaagggcaatgacctaacttttactcaaagtgatagtgtaataccaggggcagtactgaactccaggcccaaggtcttgctcaaggacgaactaggactgttggaacactgaggctttagctatgtcagaattcaatcttaaataatataatatattatattatataatattattatattataattataatgagatgatactgaaagagagcacgtggatccatacactagactaatgcgggaatggagaattaagagtacaccagactccaggaggagatcttccttgaaactcttttcctcatgagtgacttttaagcctcttggcttccgctgactcgacaatagtgcgtggcatctctagttttatgtggagtcctttgatccacttagacttgaactttttacaaggagataagaatggatcaatttgcattcttctacatgataaccaccagttgtgccagcagcatttgttaaaaatgctgtcttttttccactggatggttttagctcccttgtgaaagataaggtgaccatacgtgtatgggttcatttctgggtcttcagttctattccattgatctacctgtcagtcactataccagtaccgtgcagtttttatcacaattgctctgtagtacagcttgaggtcaggcatggtgattccctcagaggttcttttattgttgagaatagtttttgctatcctaggtttttttgttattccagatgaatttacaaattgccctttctaactcagtgaagaattgagttggaattttgatggggattgcatttgatctgtagattgcttttggcaggatagccatttttactatattaattctgccaccccatgagcatgggaggtctttccatcttctgaggtcattttcgatttctttcttcagagacttgaagttcttgtcatatagatctttcacgtccttagttagagtcacactacagtattttatattatttgtgactattgtgaagggtgttgtttccctaatttctttctcatcctatttatcctttgtgtagagaaaggccactgatttgtttgagttaattttatatctagctactgcactgaagctgtttatcaggtttaggagttctctggtggaatttttggggtcacttatatatactatcatatcatctgcaaatagtgatactttgacttcttcctttccaatttgtatccccttgatctccttttgttgtcaaaatgctctggctaggacttcaagtactatattgaataggtagggagaaagtgggcagccttgtctagtgccccattttagtgtgattgctttgagtttctctccatttagtttgatgttggatactggtttgctgtagattgctgttattatgtttaggtatgggccttgaattcctgatattttcattacttttatcatgaaggggtgttggattttgtcaaatgctttctcagcatctaatgagatgatcatgtgatttttgtcttgtatattaaaccatccctgcatccctgggatgaagcctacttggtaatgatggatgatcattttgatgtgttcttggatgcgatttaggaggatttcattgagtatttttgcattgatatttgtaagggaaattggtctgaagttctctttctttgttgggtctttctgtggtttaggtatcagagtaattgtggcttcatagaatgaattgggtagagagtaccttctgtttctattttgtggaatagtttgaggagagttggaattaggtcttctttgaaggtctgttagaactctgcactaaacccatctggtcctgggctttgtttttggttgggagattattaatgcctgattctatttctttaggggaaatgggactgttaagatcgttaatctgatcctgatttaactttgctacctggtatctgtgtaggaagttgtccatttgatccaggttttccagttttgttgagtatagccttttgtagtaggatctgatgatgttttggatttcctcagattctgtttttatgtctcctttttcatttctgattttgttaattaggatactgtccctgtgccctctagttagtctggctaagggtgtatctatattgttgattttctcaaagaaccagctcctggtttggttgattctttgtatagttctttttgtttccacttggtggatttctgccctaagtttgattatttcctgcagtctactcctcttgggtgaatttgcttccttttgttctagagcttctaggagtgctaacagactgttagtgtattttctctctagtttcttttggaggcactcagggctatgagttttcctcttaggactgctttcattgtgtctcataagtttgggtatgttgtggcttcattttcattaaactctaaaaagtgtttaatttctttctttatttcttccttgaccaaggtatcattgagtagagtgttgttcagtatccaggtggatgttggctttatattatttatgctgttattgaagatcagccttagtccatggtgatctgataggatgcatgggataatttcaaaatttttgtgactgttgaggcctgttttgtgaccaactacatggtcagttttggaggagttaccatgaggtgctgagaagaagatattttcttttgttttaggataaaatgttctgtagatatctgttaaatccatttgtttcataacttttgttagtgttcatgtgtctctgtttagtttctgtttccaagatctgtccattggtgagagtgcggtgttaaagtctcccattattattgtgtgaggtgcaatgtgtgctttgagctttactagagtttctttaatgaatgtggctgcccttggatttggagcatagatattcagaattgagagttcctcttggaagatttttcctttgatgagtgtgaagttcccctccttgtcttttttttgataactttgggttggaggtcaattttattcgatattagaatggctactccagcttgtttcttcagaccatttgcttggaaaattgctttccagccttttactctgaggtagtgtctgtctttatccctgagttgggttttctgtaagtagcaaaatgttgggtactgattgtgtagctagtctgttagtttatgtatttttagtggggtattgagtccattgatgttaagagaattaaaaaaaaagtaattgttgcttcctgtgatttttgttgttaaagttgggaatgtgttcttgtggctgtcttcttttatttttgttaaaggattattttcttgctttttctagggtgtagtttccatctttgtgttggtgttttccctttattatcctttgaagggctggctttgtggaaagatattgtgtgaatttggttttgtcatggaatactttggtttctccatctatggtaattgagagttttgctgggtatagtagcctgagctggcatttgtattctcttagtgtctgtataacatctgtccaggatcttctggctttcatagtctctggtgagaagtctggagtaattctaataggccagcttttatatgttacttgaccctttccccttattgcttttaatattctctctttatttagtgcatttgttgttctgattattatgtgttgggccaatttcttttgtgatccagtctatttggagttctgtaggcttcttatatgttcatgggcatctctttctttaagtatgggaagttttcttctataattttgttgaagatatttgctggctctttaagttgaaaatcttcattttcatctattcctattatccgtaggtttggtcttctcattgtgtcctgaatttccttggatgttttgaattaggctctttttgcattttgcattttctttgattgttgtgttcatgttccctatggaatcttctgcacctgagattctctcttccatctcttgtattctgttgctgatgctcacatctatggttcctgatttctttcctagggtttctatctccagagttgtctccctttgggttttcttcattatttctacttccatttttagatcttggatgttttgttcaattccatcgcctgtttggttgtgttttcctgtaattctttaagtgatttttgtgtttcttctacctgtatagcagtgtttgcctgtagttctttaaggacttctacctgtttagcagtattctcctgtaattccctgagagatttttgtgcttcctctttaagggcttctacctctttagcactgttctcctgtatttctttaagtaagttattaatgcccttctttaaatcttctaccaccgtcataagatataattttaaatctgagtcttgcttttcgggtgtgttggggtatccaggactcgttgtggtgggagaactgggttcagatgatgcccagtgttcttggtttctgttagtaagattcttacgtttgccttttgccatctggaaatctctggtgttaatgatcaaactgtctctggttggagcttgatcctcctgtgattctgttagcctctgtcagcactcctgagagtccaactctcacctgagttccagtggtcagaacactctctgcaggcaagttttcctcttgtagggcaggtttccagcagtctggagctctgatctacctcctgagttctggggtcagaacccttcctgtaggccaactctcctctggcaaggaatgtgcccaggggtctgggtctcagctccgcctccctggctgaggatgaacgcccaaggtgaccctgactaagaagcaatgttgcttctatcacccatgtgctctcaggtgatcaggaagtcctgggtgtgctagggatcctgtggcatggagagtcctctggtgccctatatgcccttggtcgggttcacgcagaagatggtggtgctggatccgacctgaatggatcccagcctctggtccggtggggttcctttgtccctgttcctgctggcacaagaccctctgaggttctttggagttgatgttgcattccactcacctgtgatcccgaggtgatcccaaggttctgtggtgtggagagcactctggagcataggtttctttttttacccctcagttctctgtagctaaattgaagaagtgactttggaactcacttggcttgttcttgtaaaaaggtgggaggtgtggtctcttgtgggtttttcagcattctaacaggagactgaaatgtcagactgacatgtctcccctgtgctcacagacttctgaatgaactctaagcttgcatatgtgcttcataggatctggagtcagggggttagcttgccaaatgctggaataacactgaagatgagtgagttatcaactgacattagtttccttggaattctagaggctggaagtctgaggagattttgtcaagcttgggttctcctgccacatctcttcttggcttctagtggctcctcttactgtttggatccgtggtcttcattctgtctttttctatgtcctagtcttttctttctatgacagcagtcatgttggaggacagatgactatggtggcaacattttaacctcctcaattcaggacctcagtatgaagttaggaggtacacactttagttgatatagggagggccgcatagtctggccctctcttcctttcctgacctcatggcctcttagtgtcttattctatctgttctagccacacctgactcattgctgattttaagagtgtaccaaaccctatctcatggagatgagctgtcacttgcggtccggtccctgttccttgcaggactggcccagtctaactctccctgatcccattgcaatgtttattctttatgtcacctaccaccttgtaaacagacatgtagtttattgattatgtgttctttctaactctaacgaagtctcttcaaaagaggggtttttgtgtacttttctcattactgcgtcagtataccaaggatgtactgggcattcttcaatgactgaagcaaaaggatgagggtgttttgttgttgcggctattgttggttttttaataatgagctttgtgtccatcctcctatttcttattttaaagagatacttcttaaaagacaaagggcacttaccctctcagggaaaccttggaataaattacctttgatgaattgacatagaaaccttaggaacctgcctgtaacctgctgatgccctcagtctctactgaccgactgcagcagctcctggggactttaatcatgcaatccttttgacatgaccaaatgaagtgactgttgtttaaacagggttcatctcagcaactgtcctgtttttgttctccctttctctgttttcttgagttcatgactatctcacataatctctcaggttggagtccacactcccggatatggtaataacctcttacatgcttggattagtgcattgtttcaaacaatgacagtgttcatacagtgtgatctcttttcttttgttccccttttttctgttattctctcttgtttagcttctctcttttgagtttttgtcttattaaaatttctcttaattggattcattctccttgaaaataattgtttttcctttcatatgttgtcaattggaataattctggataaaaattctctacattcatggttagggatgtggtttaataggtaaggtgcttactgtttaaccatgagggcatgatactctcacaaagcccacataataaaaggggagtgttgtggttcttgtttgcaatcccaggaatggggagacagagatagtcagatctgaggcttgtttaacagatagtctagcctaattagtgagtaccatgccaagagagtatgtctcacaaaagaaggtggatggcacctaaagaggaagtgtttcatcttctaacctccacatgtgtgtgcacatatcacccacacatgtgtacctacacacacacacacaaatgtgtacccatatctacatgaacacatccatacacatacatacacacactgctcacatatcacatacacacatatatgtacacacatacataaacacatacacctacatacagacacacacaaaaacatacatgcagatacatatacacatacacataacacacgaatatacacatgtacacacacatatacatacacacagcacatacacaaacacaagtacacatgcacacacaggcacataaatacacacatacaaacaaatacatacaagcacatatacatacacaagacttatcagtattcatgatactgtgtccataatcctgagagtcaggaagctatatttttattcatacacatgagaaatagaaatccagatctttgaaaatgtgcagttaaaactgaaggaaggtggatggttgaggctatatgtgaagaactactagaggaaaggaaaggaaacagagaagaaaggaatcagaaaaaaggttgaagtgaacagagagtgtttaacaaaaaaagcttccaagagaaagagaaaatgaaagagaatagataatatggttgagtggcagttctgagactttgtgcatctgaattcttttattattattacttgttaacctcacaaatgttgctcctcctactggtccccagagctctcccccccaccttcctctgagagggttccctacccctggtattccctcctacctggggtattaagtctctgcaggattaggcacatcctctcccactgaggatcgacaaggcagccctctgctacatgtgtactgggggcctcagaccagcctgtatatgctctttggttggtggcttagtctgtgggagctcccaggactcaggttagttaactctgttgattttcctatgggatcatctccttcagttccttcagaccttcccctaacttttccataggggttcccaacttcagtccaatgctcggctgtgattatctgcatctgcctcaaatagctgttggtagagctgaggacagccgtattaggccttcgtctgcaagcataaaatagcatcagtaatagcatcagggtttggtgaccacccatgggatagatcccaagttggacttgtcaatggtcttaacacatataaatacttctaacagtgctctaagtgcatctttatcatcaggagtttacatgtgtgcaggctggtcagtcaagtgtcttggtatatccctgaaagtgctcttaccctctgaaccatttgttcaacccactctcatttgtttctgaaaaccaagttgaataatgcttttgttttcaacttccctgataactctagaccttgcaacccatagtgattatctttctgttcactctatcatcaactgtaagttcctcaaggtcggggccatacattattcatctttatgcctcagaggtggtgttgaaaaaagtagactatgaattctcagagatttaacttcgtatttttgctttgtcactccgcagttgactgactttggatagtttcatatagatctctctagcctctttggctacgaatagataaaaaaaaaaaaaattcagatactgatcttgtcaagctcacaggttagaagtttgagaccttggtgctacaataggcccttatctggtagcttctggttaatcacgggtccctttcagacaagaatatgatttatatgatcattaagatgaaagaggcaaggtaattttgagacattgtggtctgtgtgaagatgattagtgtgtcacagacaagtggctgtctggaactgagaagcatggctgggaaatgtagttcctcctctaacctgcatctttattcccatgttttcttaaattaggccagcaatgccacctttaagcttaaacaagagtctggggtagttcaaaagtcctgtctcacagagtgtaatgccttcagctatgtgactacattgtcctcagccactctgacttttattactaacaaagttttctgtgcctccaccccggtagtgtcaatggggactaagtaggaagactggtacattctagagggtccccccacctcccgagggtgtgtatttccattcattctgttggcccttggagcttcactcctggtccccccccccccgcccccaatacttgaccatgttcgccttttcccctgcccatccccctcccctctcccatccatttccccctttcctctgccctctggtttcttcttcctccctagtgagattaaagtatcctcatttgggccctacaggcttgttaacctgtttgagttctgtgaattgtatcctgggtagtctgtgctattttggctaatatccacttattagtgagtacataccatgcatgtccttttgggtctgagctatgtcactcaggatgatattttttacttccatccatttgcctgaaaaactcatgatgtcctcattcttaatagctgaatagtattccattgtataaatgaaccacattttctgtatccattcttccattgtgtgacatctaggttgtttctagcttctggctatcacaaataaggccactatgaacatagtggaacatctgcccttgtggcatggtggggcatcttttgagtatatgtccaggagtggtatagctgtatcttcaggtagatctgttttcaattttctgaggaacctctagattgatttctagagtagttgtaccagtctgcaattccacaagcaatggaggactgttcctttttctctgcattcttgccaacatgttctgttacttgagtttttgatcttagccattcagattggtgtaaggtggtatctcagggttgtgtgccagagacccaggaggtgagagaatctcaagactcaaagggagggaccttaggtgaaatgcccaatagtggagagggaagttgtagaatccacctccagtagaaacacaggacatcaagtggagggatggggttgccatcccacagtcaaaaactctgactcagaattgcccctgtctaaaaagaaatgtaggggcaaaaatggaaagatattgagggaaaggaggtccagtgactggcccaaatggcctacactattactgatgctatgttgtacttacagacaggggtgctagcagggttgccctccaaaaggcccaacaagcagctgactgagacaaaagcagatacttacacccaaccaatggacagaagcttgagacccctgtaattgaagtggggaaaggttggaagaagctaaagaggagggtgacctataggaagaccagcagtctcaactaacccacatccatgagatctctcagacactgagccactatccaggaagcatacactagctggtccaaggccactgacacatacacagcagaggactgcctggtttggcctcagtgagatgcacctaacccttgagagacttgagaccccagggagtagggagacctggtggagtgtggggggtgtgggagtgtgggacatcctctcagagatcggaaggaggaatgggatcaggaactgttggagggcagaacatgatggggataacaactggactaaaaaatagattgaagataataataataaaaacaaaagtagaaagactggactaccaaacccaccagagattcctgttgtcaccactgaaccgatgctggtgagaagtcattgtgttctcttcaaacattctacatcagtggaaatgtattctgaatggattatatcttaccactccccatgacttcttgcccttggccaccattccccttttctatttgacttggttttcttcttaagattctgttcaaaaatgaagccatagcttatttatcattccatgtcgagcttcattttcttagcataatatcttgtaagtccatctgtgttgtgagaaatggcagttgtgcttccaggctgaatattattttttcatgggcataactaattcagctttttgtattcccactcaccttctcctccaccttttacactgtttgcttgcctgcttatttatttatctatctgtctatttatttatttacttattcacttatttatttattgttagctatatgctgggagtaactctaccatttggtaaatcctagcccccagtataatttatttatcaattcttgctttatatccactattgtaaacaatagtacaatggacataggaatataaatgtccctacaagattctgatttatttcctttgtgtgtatatacagaagacaaattgctggacacatggtatttctatttggccatttgaggaactttcatgtagttttcattagtgagtgtatcactgtacattcattcctgttaatagcataagagagctcaatttcttccttcatcaatacttgcttctctctcttgaacacagttatactcacaggtatgatttttatgtctcactgccattttgatttttatttccttgatgattaatgatgttgaaggtattttaaatttttagccacttttatgattcatcatagatacatttatctaagacctcaaaacacaaaacagaacaataaaatctctcaatgaagaaaaactcaaatcctgctgtgtagaccatggtcactttgagcctttggatgtgactgtctctcatggctggatgttggaatttcaggctttgtacttataccagacaccgctgtctaataattttttctattgaattatgtgagtttcttatttgacattttagccctctatcaaacacatgggttgcaaacatttttttccttaaactataggttttctttttattgtattgtttcattagctgtgaaaaaacttttaactttaatatggtttcacttacatttttttcatttttgttgcttgaaattttggtgatttaaaaaaaaatcagtgctaattccagtgccaaaggaacatatatctcttgcatttgctttatatagttttgtggtctcaggatttctgtattcattccattttcagctggctattctatgatgtatggaaagcatccaggtcttgtacatgtgtatgctcaacttttctatccctgtttattgaaggagatgccttttcctgttgaattttcttggtatccatacctgtgatggtttgataagaatggtgctcacagacccatgtatatggaggcttggccatagtgagtagcactattaggaagtgtgaccttgctggacgagggtatcactgtggaggcaggctttgagttcatagttgcttaagctccacccagtgtgggacacagtctctgttgccttctgatcaagatgtagaagtctcggcagctctgacgccatgtctgcttgaatgacgccatgcttcccaccttgatgataagagactaacacgctttcagccatcactggaaagagaggcccattggacacgcaaactttatatgcccccgtacaggggaacgccagggccaaaaagggggagtgggtgggtaggggagtggggggtgggtggctatgggggacttttggtatagcattggaaatgtaaatgagctaaatacctaataaaaaggaaaagaaaaaaaaaaannnnnnnnnnnnnnnnnnnnctaacacgctgtaactgtaataaaaattacttactcatatactcttgggtttatttctgggactcttaagcttattctctcagcctgtctgtctgatttatgccaatatttctttcccatacaagttggttttgaagttttgaacttacaagttttattcctaaattctgggattttaggccctctacttaagaacatctgtctaatttcattcttttttcctattattgagtggtatgagatacttaaatattttatatgttgaatcttgattagacacaaggtttgcaaatattttcagaaaatatgatgcctcttacctttgatttccttccttaaggataattttggtgatacggcatctttcacggttccagataattcttttaaaaatgttgtttcctattattggaggaaaatgctgttgtaattatgataaaattgtgctaaataagtacatcattttgagcactataggtattttagtattaatcttctaacacatgagcagagaacatacttttatctatctatctatctatctatctatctatcatctatctatcttatttcatcaatattttataggcttttaaaaatataatactgtttatttaactttgaaaacatttcagcattctaaacacacaaaaaataacagagtattgtaaattgtgtttaggtccagggggttcttgcactttcattgagtagcagctcttcgctttgctgacaatgatgagtcctacagtttctttacaaagtttaaaatctactgcacttaactaaagaaaaaagctccaaacacttctcatgccagctgacacctctcccctttccacaactaagaatgtcagcaaaatgctatgccactgtatacaaacacaggacaacctgaagctaaatggatgctcaccgcagtatcaacaggtccagcctcacagtgcacgccctgagctacggccccctccaaaaggcatcttcccctcacagcctccacgccaagcaaggagcatcaagaatctctctgggttgttttgttctctttacaaactatagatatgtacagctgacaactcaggattgctagccaataaccatatagttaacactaccttatgagttgagaacaaaatgccagaaacatcttcaaatgccttgtcacaccaacagcaaagtgccctgagtgaggaggactcaagagtacattttcattttaaaaatatctagagctttgtacaactttgatacaatttcagggtgccctggacacccatggccacttcatgtaaagcactgtcactttgataaactatgatgtaatagtgatcaaattttgtaattaagcctaacaagggcaatagacatgactcaaataagatatgtgtcactcatggcgctctcctactctaaggtattcacaaggagacagagttttatttctcctcctcctcctcttcctcctcttcttcttcctcctcctcctcctcctcttcatccaccttttcccgggcaactatagcaggaccctttgcaccatcaaacttccctttacacttacagtcagaaacatccttctcatacttctccttcagctttgctgccttggtaatgtaaggctgctttcactgtcactgaagttattccacatctcacccagcttttttgccacatctctaatggagattccagggtttgtggttttgatcttgggccggaatctggagcagaataagaaaaatccagatggaggtcttttgggagcatttgggtccttcttcttcttgcctcctttagccggtccacaatcttccatctctctatcatagagaaccttatctacctttggcatttcatcaaacttttatttctctttggtagacattttgtcgacctctcagagcaattcttggaaaactccataaaattgactggaacctctgggtttttcttcttatgttcttccctgtatgtctgtatgaagaaggcataagcagacatcttgccctttgttttcttggggtcacctttagccatcctgactgtattgttcactagtctgggcattttacaggctttagtgtatgtatcttttcacttgttagctacatttattctttaacgttttattctattttcatactattattaaatgggtagtttttatttcctttttagacatatcagtattatcatggagaaatgaagccaactatatctagatagatgattatgttcatggctttaataaatttattcttggattctattgtttctaacagttatctatggaactattaagctgttctgtagagtatcatgtcatctgtaaatagagataattttacctttcacacgatttgaatgctcttttatagtttttcttgtaaagttgctcttgctagtgtttctaattcaagactgagtagaaataatgaaagtaggcatcagcatactgtactgaatctcagaaaacatgtttcatttcccactagaagtgttaggtgcttatcattttactatgcacatgcatattaaaataccatttcaagtacccttagtctgtataataagatgaataaaaatgatctgtaacaaagcacagcaaaacaaaataaaattgttaaaataaaatatcagaaattgtgttatggggtaaaaaagtattcaacccaaacatgcattgtttctgagttgctcataccaaatatagtaatataggcaagttgccatgaacaaattctgaaatatatgcaaaataaacttgaagaaaatgacaatgagagtgcttataatattatcaggtgaagcaaacatcagagaaaatgcaatggccaggacataaggaaagacattatccaatagcaacaagcctccagcaggttgcagaagcaactctaaaggactcacagcccgaaggtctggcagttcaaacatagcagatagagctgagaggacaaataagcagatccacaactgcagttaagacctcaacatacttccctcgtcatctatagtaaatcatcaagaacgcagaactcagcaatactgtcacccacctggattgcatcaatataaaaagagtacgcacttaacagtagcaaagtcacaatatttccaagcgacaacaaaatttacaatgaaataggccatgtctgtgccaccaagaaacactagaccaacctaaaagtaattgaagtaaaatggactaatccccccacacacacacttataacagttctagactcaactataaaccaagaagagaaacataaaagagaaacctacaaacacttggacctaacacctcccaacccccaaataatctagggatcaaagagaaagtctccaagaaggaaactgggaacggaggacaaaccaagttaaagtaaaactgaaacataaattaccaggacataaccaaagcagcactgtggggaacatttaaggccccaaaggattaggggaaaatgtctaaattcatgacctaaactctcttctaaagaacccaggaagaaaagtaaaaaaaaaaaaaaaaaaaaaaaaaaacccttagaaccagacaaagagattagttttttgttgacttaacagggctttgtttctgtggaagccatatttttgtttgttaaattggttttgggttctgaggcaaggtctctttagtccaaggtcttctgaaactcatgatgtagctagttttgtacttgtggaaatcccctttcctttgcctctgagtgctgggattcgatgcaagagacaaccttcctggcttattcgaagtttctgattaaagtcaacacataaagtattctttacaataactgattaaactaccaggagatgcaagctataaatggaggttgatggctactgtaatgatgaagataattattatggatactgctccctttttgaccacacaaatctctctggaaataaatcacaaaggatgaagcaatacatttgttttgcctttgattaatcactgttcatcttatgctaaagaatagtgtagtcatgaatttaagctggtgttcagagactaggtaaattgttcttcatgcttgtgttttcatttatgtaatcaggccataaagatacctccgctagtggttcttaactgtggtggttgcaagttagaatcatttagagaactttacaatatgttggtacctgggtgccatccagtgaaattccaatttaattggcttatggcaaagagtctcaaattacagtctcaaatgtgcagcagcagtacttgggaacgtgttagaaatgcaaatacataagtcccaccctggtctgaccacgtatgtttgaacaaatctttccaatgattctgaggcaatgtgtcacaaattttaatgtacttatgactctcctggggaatcttataaaagtgcaggtcatgattgctggtttggtgtagagatcgagatgattaataaactcctcgggatgctaatgtagtggggagtggaccacaatttgaataacaagggcccgtatgacaaatgtacatttgaatttataaaaaaaaacttcctagtttggaatgcagccaaggttgaggataactagattatcttatgtgtctgccaatgcccataatacttgaataaactctccttaatattccatacttgagattttataataatcaaaaatgtactttttgaaaaaatgtttacttttaatttgtgtgtgtatggtgtnnnnnnnnnnnnnnnnnnnnnnnnnnnnnnnnnnnnnnnnnnnnnnnnnnnnnnnnnnnnnnnnnnnnnnnnnnnnnnnnnnnnnnnnnnnnnnnnnnnnnnnnnnnnnnnnnnnnnnnnnnnnnnnnnnnnnnnnnnnnnnnnnnnnnnnnnnnnnnnnnnnnnnnnnnnnnnnnnnnnnnnnnnnnnnnnnnnnntgtgagtgagctacagtatgaatgcagagaactgcaagagtatacctcttaggagtggttcttttctgccacattggaggatttaatgatctaagtcaggtttccaggtctccagccactgatccaccttgctggccattattatcttttaagtgatggttgctaatcctagttttttctttagttgcccagagtctcaactgtgataaatgtatctgttattttctggatctaacatggaaagaaatcttgacttctttaactaacatgtttttttagttatttaagagtttcatggcaatgactctcataatgtggttcaatcaaactcaccccctaatttcttcttcaattccttcttactccttcataacttctccttcttgcttcatgtgtttatttcttcaacccccgaatccacttagtattctaaatatatccctgggtatatgacgatccacttggccatgggcaacctctctagggctctacctttgaagaaaacttactcttctcctagaagccattgattgctaataactactcagctggtagtggagccttatgagccctcccataatcatgctggcttgctcttgtgcagttcttatgcatgaagtcccagacactatgggctcatgtgtgcaataacccatgtaggttagggagtgtaatatagatgtcttacttagaattggatgccactaaatgtcttgttccctgcatgttgatcatttgtgggattaactatctatgttaattagtctatattaatgggaatgtactgcaaaaagaaactttgcttttgaaaggctgagaaatgcactaatcattggatataaagataagaatttatggagcaattgaatactgtgcctatttaagagaatatcaatattaggttctacactaggacctatggcttagtcaaccctggttatgtattttgggctaaggaaatggtaccagatatgagtctcatcttgtaggacagacctgaagtacaatcagtaagtggttgcttcctcccacaactttgaagccactatgacaccagtattacttacaattagtatagtttggaaggtacactgctatgtaagactattaacaccttttccatacatcccggaaagatgtatagaacttcccagcataaagatatatccaggaaagatgaagcttctagttcaatcccagcttgagttctccgtgtcctgtgattcgagcatgtggtatcttcagcaatacggtctcagtttttaagttctgttgggtaaccaagggtatcttgtaatgtctgaggaatcttgaaactctacaattcagcaacgttaaatgatgtgacgcatatcaggctttaggatagtctatgttgtctgggagagccattgtctccaggcatagagtaactccatttaaactccttttatgtttccctctatatatacattttatgaaggtatgaagtttctgcaagttttcatgtagtttttctaaaagatcttgctgttagttatccctcctcatgctttatcctctaccctcctctcccattccaaacatcattaagcctctctggtccagtttttctcataaatactacctgtgttctatcccctgccttgacgccccccccccccagtggcctcttagtcttctcctgacttccgtgggtactctaactaaacacatgtgtctagggattaaaagctaacactctcataagagagataatatcctctttttgtctttctgggtctcagtaacctcagtaggataattattttcagctgtattcatttctctgcaaatttcaagatttcacatttgtctttataattgcataataattaattgtgaatatgtagcatatttgtgttatgtatccatccactgagggaaaagtaagctgtttctatttcctagctattgtgaatagtgtagtaatgaacatggatggacaaatatctgcagtaggtgtatagggtccttcgaacatattcccaggagtgataaagctgtatcttatggtagatctatttctagctttttgaggaatatctactgattttcttggtggctataccagtttgcacttataccaacagtgaataggtgctgcacttccccataagcatgctatcatttgtttaaaaagtttaagcactctgactttaatacatgagagagtgggattgaatcacaagatggaaagcaacccaccatttgctcatagattggtagggttcgttattataagaatgtctatcttaccaaaagcaacatagagattcagtacaaatctcataaaaatttcaatgtaattcttcatagaaactaaaaaaaaaaaaaaatcttaaaattcatatgaaaacaccaaatcccaggacaaacaaaaaatccagaacaatacaagtactgctagagatatcaccatctccaatgtgaagaaatgccatgtcatatcaatcaaaaccataccacacagacataaacccaaacatgacaactaactgaatagaatcgagggttctgctctatgcccattcttctcgtcaccccactaccactatttgcacaatttagtatatataaggattgtttttcattccagataaagattacctaatgagatgaattattcactttgacatactggaagatggttaggctcctctttattaagggaatgtggggccttttcacttgcgcagacattgctcagagacaactgtctttgaagcatcacctctcatttcatacctccctgacgcatgctccatgctcacctgttctgatttcatctggaaacattctcatatgaataacttcacgtccagttcaaatcgctccatgacaggtcatttggtgtacatctctaagtgtacacttcttaaagtcaccagtcttcccttccaccgccacctttcttcctgtattttctacatcagtcagagtatctcttgactctgttgccgttgttccaacccaaacagggctcattgtgaggtctcaggactctccccatcttgaatcaatccactctcctctcacgccttctgctgctctggtgcagggctttgtcatttcttgcttaagttttattgtggtttatctaaatcttttcctgcttgctgtcagcccggcctctcactcttgagtggtatctgaagtgtgcattctgtgccttcccatctttaaagctctggtaattcttctttgacctgagcattaggtctaagctcttcgttatgacttaagaatcacttatgctttactgcttgctcacttttggaagcaacttttcaccttgaacctggtacttttttgtatgcaccatttctctgttttattcctttggcaaggtgatgcctttacttagagtatcttccttgcctaaccttttctctcccttttcttttcttccaagatactgactttgaacagatgctaacctctaccccaccctttcaaggataccataactctatccctagggctacaattatcaccctgaactttaactccctgtttacttgttgtgctaatgaatagcttcttctagacagggattatcttgttccccatggccggaagcattaagcttagtgcctatattatggtctctacctaatacatattaattagcaaagtttccagatgtgcaaaggaaggagtcagccctggtaccgtagcagagaaagggcagacctatgggaataacagaaatcacattatatgttgtagcttctttatttctcaccgtcttcagcttcttataatttaatatttagaaaaatatgtaaaatgaacagagaagggtattctaattaggctgagtggcatattttctgccccctgtagtatcataatataattttaaagggtgtcagttaacacttaaaattttaatgtactcacagcaatgccttttctaggttctagtttctttcaaatccagaggaaaagtccgatttaactgacataagtctacgtcttgagttctcaccttcttcccatttcagttactgggtcctgtgtggtgattctctaacatacacctaatcagtgtgaggtcaggtagtaagacaccttcagcatctgggctggcactgtactctcacacgtgatggacttctgctatgctcttcagtcctgactcatcccttcaccctgggaactgtatttacaatctttgaagaaaaagcaaggtttcaaattttccagtttacttcctagatgcatattcacctaaggaaaaattgtaacttaagccaaaccttaataaacaaagaccaaatacatatgcaggatggggacaacacagcatcttctggaatccttaagtatatctttgaaattctataccccagtgtctgagttccaccattgcctcctgattcagctgagtcaccctctcagaatctgctgagaactgtttaaggttgacatcaatgctgaggcttgatgagctctgagcagtccacactttaatgtgtattcatgtcctgtaactcctcttgtagagaaagcctgcccattgaatccaaggggcctcctgcttggaaactagatatgcttattcttggttttctacatctgcctacatacttctttctgtgcagaggttgcctggagccctgtttctcatttctcccctgctcatctaaattttattttatgggcttcacttcatttcatcttcttctacaactaaggcgaagaccctggtgcttcgtcattcttgatactgtatttcattctcccaaatcatttcccattcttttagagcagaggttgcattttcttctctatttagcatgggaagtacggctcactgtgctacgctatgcagctcactgagtctatttaagcgccctgtgaaatgacacatagaactgttcttgtcatgctatctaagggcttatccaaaccagattagtacagagaattctttaagctactacaacattcttctgatattttctgtggcttctgaaattattaaataagcaattttctgggggggattatgcctccctggctcttgtgaaacctatcagtatttttttttctaacttactataggactgtgataaaagaattacaggatgaaattataggcttagagatgagagccaactggataccttcgttcttcctttaattccctgctacagggagacaattggatcaattgtgcttctgtatacctgaccacagttgtctgagtcatgcccagtgctcgttcctggcacaccaaataggcttttttattcaaatagatacgtaacaccagagggtgtctgtggcaaataatagtgatcttgtgccaatgttgacataacagcctctctgacacttgatcaccatgatctgcatttttcagtgtctttgccattctggtatccgtaaaagtgacctcttccaagaatcaaagaagaaatgcaactatttttctggtttgacaagctgaacttttagaaaaaatacttaacttaaagctgatgtataaaattatgtggtaaatattttaaaagaaggtgccatttgaaataaaaatccagagtttctcttctggggttttatggctttgcatataacaaacagagatcaggttgaaagtggcccacagtcccaactggttttttctatgtaactgaagggtacaaattgtcttcctgaaaccaactcccaggtaactgtctcctactggttctatctatctatctatctatctatctatctatctatctatctaaaatgttgatgcccctttatctgaaataatagcgaactgaacataagaagtcagaagtaaagcaagatggacacgaagatacttttacttttctaacaatactttaaaaattttttgataacaagtatttatgattttatagccagaactccttgctctaacaaacaagacttaaaagaattcatgaattattccgtttagctgctctgagtatagtttttggactctacatctctttggagatctgatgagagtaacttgcaactctgttcaggagcatgagcatctctccacagaaataaatcctgccctagaatttcaacaggaatctagatacacagcctcttcctggtctagcttctcatgtaggagactgcaggatctgggatacactctacctaaggcaggactagattggaatgtgtttgtctttgccatcaattgtctgttcaggagacatggcgtcactatgccactccagtcttgagttcactgtggtttgttctaagtactaagtctgtgtaagcttccctgtatacaggaagaacaccctgccctttcgttacatgtagtaaccgcaccattagtgattgaccctgcggattcagccctgtctccacagcctttcatcctggcaaagttagtttcctttgattggaaaggtgaatggtagcacctatagatgagtcaatacttcattcagaatctagaattcaatagtttctccgattctccgatttcattgtgttcaaggtgattaggtttttgctttgacaatttgtttttcttcttccagttgtctggctatttcctttggcaccttggtactgatgaagacagcagggacagaggttgacctctgtctgtctattatggaatcattaattgagctgattcccatggtagttcctagcttgcatggcatgtaaagtttggggctacaaaagccacaggtttcttgacatcagaagcgtctgtaaacaagaacaacaaaacaccttcctcagaagtgaaaggagagacgatggacaggagcaatagacacaccagagtcagtctttcactgtgagtgagtgagtgagaaaaatcctcgtcttgtcagaaagtcccacagagcatcataaactgcttcagacagcacatcctgcagataggagaattctcttggtacaataaaacctcaatcatagatcgagaaacagctgtctgatatatacacattgtgctgttaagccatccacaatgtcatctctgcagaggttctaaactaaaactagaactggatccccacactgagtaaagggattatgccaggggcactgtctgagtacttccgagtaccagccatggggaggtacttatgcagttgtttaacatttgctctgaggaactccattacaaacaaaagacaaagctttgtgtatgtgcctctaactcaggctttctcttctttaacagatggactattcagtggcatattttatactgtgggatggaagtgctgttatagttttctacacttatgtgcgttaaaatattatttatccacatatacattacatgtatatgtaaatatttataattattggttgatatatcattaatgaaatggaatacagaaaacatgagctcatatgcttgtacacacacacacacacacacacacatccacaaacacacacacactcagcacacacatccacaaacacacacacactcagcacacacatccacacaaacacacacgaacatgcacacacacgcacccccctcccccgcacacacacaccaattatgtatcaacacatatagaatcaaagctggctctgatgaagaattcttctcttctctttgctaccttgcttatgtagcatatttcccagtccttctcccaaggtatatttctaatataaatgtattcaaaatatatatacattttaaagcctatatcatttctatactattgctttaccataagtcttcatttatcctagtagagtgttctttaattgttattctaataatatctatgtggtggtagataactagaaaaaaaaaaaacaaaaatagttcctaaggagcctgagatgaaactgcatgaggttatgaaacccagagatctgactgaatagctttttctttgcactagttgtttttattgatcagtcttcaccttcctataaccagggaagaagcctgtttctgctgtcttcatctctactaggacccccaatggatgcccacagagtgcccagcaaggatgaaaagtaatgacctgtgtattgaatatgagcatcccacacacacattctatcaaaggtcaggctcagaaatctcaggacccacgttcttctcttccttctgggcggctttagagacacccagtcaagcacaggctaccccactggctgaacaacagtaacaccagaaagctgtccacagtgcaggatgccaagagagaagtcagcaaaactgcgtgataccaacgagcagttagcatttagaaggtgaccttttcttcctgaaaaataattttcggttaccagactattgaacgccaaggctcccttctttataaagtctcataaaaagcacattctgattctactttatggttctcaagagtctgctttcccagggctttccaataacttgcagtgggagagccagccatttgtactcctagcaagaggaaacttcagtaatcagttgttttcccccctctcactgttttcccctgagctcacaaatgataggactatattcaggacaggcacttgccacatgaaacaaatgatccttcacctctctatgaatgagtctgtgtcccaagatgtcttctcttcctggagggagccagctctgtgtactcatggtctgtgctagtaaacatctgctcactcacatgaatagggttgtatctttattgacacatttgtcagagaggctgctggccccacaacatcttgaggaggaaatggggcaccttggctggagtgcagccttgagggacatggtgctaccacatatggtgattcctggcaattattgtgtgcttgagctctttggcttgtaaaacaacaaggggatggggcagaaagaggataagttctgtctcagcagctaaggctttctgatcaagtcgtagaaacaggccagtgtggagcacgggccatcctctgagtgaattccactgtgtgccataaaccttgatgtttttggtaaaagcaatgtatccttgaatgacctaagcaaaaaggttctttccaccatgccccctgggagtaaggtttccatggcaagcatctttatttaccaggagagccaggtagatcatctttatgtttcagtagtgggctccagtttcctgtagaattatttaaacaagccagactcatcttgtcatgggaacccaactccttcccctcttgtgtctatttacacagtccctgcttgttcatgctgcttccatgtccaacctccatgtgtcctatgtatgtgcatctcagggctgagagtttttgtgataatggttccttgtaaagttaatgtgtgcaatattggtatcatgttttcagctatgtctctgtccctggcatgaagggtaaaaaagaactgatcaaaacatactgcattcaccttttctacattgacacttatcctttccaatgagtgtacggagcaagaagtacacctacaatttctatcactgcctcctgggcctccagcagaggggagaccgatatttagtattttatatgtatctattgaacaagtgaataaataaatctcacagtccctcttggaaagggattcactggatgttctctctccagctataaaatcttttctaatttataaatccagtgagttagtcagcattccatcgctatgacaatatatgtaggatggggaactcgaagctgtattttgatttatggttgatttctggtctcagctcacattgcttgaccttgttgctctagtgcttttatttaagtgatatgtcaagacacaaaacagatgcaggagactggttctcactgtggctgagaggggaggggaaggggctttttaaaggccttcaaagatgtggcctaacttctctctgctagtctccctctctaacctttagatattgcaggctactgaccacatcttagtacctggcctttgtaaaatacttaagatacaagccatagcatcaggagaggatagggtctgggagaagagtacacaggtcttacacaatgtctccaagttcttgcaaacctgagtgggtgttgcaggcaggctaacaggtgttggttatacaccttctttagcttagtgttgcactgaagcccttttgaggattcaagcattaccatatcttggtgaacagggctgtacttcacactttttgagactctccagtccatgtgaaggaatcatcccgaaataattaggatgcaggaagggatggttagctagatagattggttgatgaatggatgggtggatttttaggctgttttctcaaggagtatttattcacagagaaagctggtgtgtgaaggagagaagatagagtagggaagggacgaacctttcatttgggggattctgtgattacatcatccctcgctaggccaacataccatttcccttctgtactgaaaccaagtcagtcagcggcccctttccccagccataataatgaagtcacgccagggaaaatctggcccaatataaagcttagaaaattctgtcattgtttccatgaaagcttgaattgaaggggacctctgaggaccctatggatcaccgagtctcagcacctctagcttcgtacttagcacagcctcccttctaaagctcgttcccacacaccatctattccattctcctaaccaagctcacaccatctaaaagtaaaactcagacccggcctcccgcagagagggagctccccctacgtttatctttgtttgtcttttaagaaattatgaggagtttagctcagcttgtggtttttctcccgcattattacataataccttaattttattcttacttgcttttcaaaggcaaagatctccaagtgagttttttctctttttaaaattatttatgcacagctctactcgcaatagttttttgttgttgttgttgttttttgttttttgtcagattttgctgtttgttcatttcacagcagtcaccagatacgttgacatctgtgaccttgagtattgttattgagcagagtagacaaggaagcagaattgtgtcaggctgtctgaggttgtactgaactgattcacaagacactctgaactctgcatattgaagcagtggaacactcaatagttttcttgcagcaaattctgggcagggcagcttcccagatgttgcttaaattgcatcaaccagatgctgctaatccttgccacggttttctttcttcttcttttttatttttatttttttaagcatgcattcatactgcagacctgtgagctcactccccaagtgactgagctcagcagctggagggacaatggttgaccagctcataacaagtaaagaaacaggtgaaggaagaaaagagacaaatcattattttgacatttctaggtatctggtatggcgatggagtcgaagggactttccttttaggttactctaagacatctgttttagtgtctttggcagaactctctaagggatgactagtccgaaaaacctcattaatatcagctttgctgctccattggaggtaggtgcaatgcaggtgggtgttatcatagagtttataagaccaaacccacctcagcaactgccactaattggctcccctgggaagtgccaagagaaactgtcaatcttgaagactcagtttttgtttgtgatttttcttctgctgctctttctctacctccatccaccctgcctctccttcttgcactcataaatggttgttcccaaaacacaaataatcaggaagacaatacaaacctcatctgagactcaaggatattgtcttcaccttcctgtccttcttccattctcaccatgaccggaagacaaccccttattctgtgaaagaatgctctccaaggtaaaactgacatgtctagaacattctccggagaaacccatcagacagtatactgtcccggtgtgttatagaaagtgatttctggttcccctaaaaattaattctactcttctgaaaactgacagtgatcttaatcccatccttaattatatccttgtattttaaggttaaattacagggtaagggaagctacatttgaagggcttagggtataaaatagaggctttctatggtcctgggtatgataatggtaataatagctaccacttaataagcaattacatgtgaattaactactccaatcctctttcataagacgatgtaatgcctcagagggaatttgttcaatgtctcagacaaatgcaacgtcaggatttgatgttaggtttgtctgactccaaatgcctgtgttcttaactttcacacggctagccttttgttttatgtctgtctggcccaatgttcaaaagtaattccaatagctacctaatccagcaggcatactgtgcagtatttgagcaagaagaataactcagggatatttgactagtcacagtgctgtttttttttttttttattttcatgtaatatatttcaggtcaatcacaaggccaagtgctgtctatggctgaatccaggtgatcgtgagctttgtgagtggtgagggtataattagaaaaatgttagcgtaatgctaacattctcctgatctttcttatgattagatagagagaatactagagaggcttggaggaagcatctctcttcttgagctgtatagactaggctatgttctgtctgtcctatgttggggagctacatatcctctggtcagtatgtcatgtagaacacatatcctctggtcagtatgtcatgtagaacacagggttagaatacattcaggagaataaccaagttcagaaatattacttttctgtgtttcaaccccatttgaagcccagcaaattgacaatttcttctttttgagcacaagtaacttaataagcttgtgtttggggtagtacttataaaaggatttaaacctgatttatgaaaactgattaaaaaaaaaaactttacagtctttgaacctaaggactccctcttagattctaagtgctaaatacaactttcctattggcttcccaatgaaaaaaaattaactagcaaaattccttagtgttaagtacttcagatcaccccccaaatgattcatctgcctatttttgagagaggtcccactggtgtagtactttttttttttaaagtcatttctcattttttaaaagatttatttatttattatatgtaagtacactgtagctgtcttcagacactccagaagagggagtcagatctcgttacggatggttgtgagccaccatgtggttgctgggatttgaactctggacctttggaagagcagtcgggtgctcttacccactgagccatctcaccagccctgtagtacttttaatagggtaggaaggaagctgaatgacttatatcctgaaattctggcaaagccgtctcagaatcagaccctccttcgggcagagtttagaataaagaggtagggggaaatggatgggagaaaaggaatcaccatggagtctgatttggagtcaaaaatggcttctgaaaaatctaagttcaaacattagctggagtcctccttttttttttttttttcagggtttctctgtatagccctggctgtcctggaactcactttgtagaccaggctggcctaggactcagaaagctgcctgcctctgcctcctcaagtgctaggattaaaggcatgcaccaccactgcctgccccctttctttattagatattttctttatttacatttcaaatactttcccaaaagtcccctatacctctcccccccctactcccctacccactcactcccacttcttggccctggcattcccctgtactgaggcatataaagtttgtaagaccaaggggcctctctttccaatgatggccaactaggccatcttctgctacatatgcagctagagacacgcgttctgggggtactggttagttcatattgttgttccacctatagggttgcagaccccttcagctccttgggtactttctctagctcctccattgggggccctgtgttccatcctatagatgactgtgagtcctcctttcatgcagtgtgagcaactatttctgtctgtaacctggttgtttctaatggatgaagaaatagggtacaaatgcatgattataatccagtttatacttcagctacaatgtttaaattctccccttccaacctactctcaaaacaaaaatccagaccagcaaagagctcaatgacaaagtttctttggggctttcatttgttttcatttctctccatagcttagagggagattcaataaacaataaaatgactgaatgttgagacaaaatagagagagcggctgtctctggtctgtggacaaacaggacagccagctactgactcagcctgtctggaaaggttagcaatgactttgaaattttatctagactatctctttccctttgggcagggacattcttagactttcccagtagacgataatcggtcctgttcgttaatgagacttcctatgcggaggacagaggctcccagaggcactcattgtgaggttcgacagctatcagggccagatcatgctgtctatttttgctgtttgtgttttccatggggatgatcggcttgttgtaaacagaattggatccatataaaaccattttatgtggtacttgaacagactgacagatatttatatatatacatatatataaaaccacagctgccctggggaccaactagtcctgtcccttcattgtcactagtggaggtcttctgtattccacctggtgattgactgggtgccttctttgaagttcatgctgtgttactgactcagtttcccccactccttcacagttttggccatctacatccagtgttagtgttttcctctcagtgttaaaagcgtgttggctctttagtctatattcaatatgtatatatacatgtgtgtgtgtgtgtgtatatatatatgtatatatatatgtatatatacatgtgtatacatatatatgtatgtatattctttctttagaaacaaagtgattttcttttcatcagttgattttgcttttgacattttcatacacatatataatacatcataatcactcttatctcccatgaccgtgaacagtgctggatgcagacttgaaaatggtgagaataagtgacagttcagtactaagtcctaggagagagtgttatacatttttttaaaaaaataaataagcggcgattgacgctgagcttggacgtgcacacctgtaattctaggactagggagaatgaggcagggtgaccaaaaattcaaagccaacctgggctgcatattgagaccctgtttcaaaaagaaaaagaaatgaaggaggagaaggaggggttggggaggtggaggaggaggaaaaagaggaggaggaggagaaaagaaggactaggattgactttgttattgatggaagttaagatcagcatgggaatgtatcaaaggctcggctgcggtgctctctctgtagctatggctgtgggggtgtgattactcaggaaacatgagccttgcttatcaccatcagatgagtgttcagatgactgcggatttccctgacaggctccatatcaggtatacccagatataacattatcatcatcatcaacaacaacaacaacaacaacaacaaaacaatcccactgataaaataggtggtgaaagtatggaaacagaggaacagatttctctactgaaaaatgcatcacgggacttaaaagcttgggcaagactttctgttttgtcttgtttgttgtttgtttttgtttgctgtttttgtgttgttgttgttgttgttgttgttattcccttccacctccatgacttttaatataaaatgccatatttcttgttatggtattttcacacatacattatctatcattcctcctgttgtccctgttcctctcttcacctgctgccttctgctttcataacacatatattttgattttgttactctcttttaaggtgtcttctcccctttaaatatgtatgctcagtgacatctagcttgagcagagcctaggagaaacagaagggactgcctgattcatcgtgtctaccccaagtgctgtggtagagtctaaatccctgtgtgtggctcaaagtttgtgcagtgtaggcatttccatcagtaccactgaactcttcaagggcaggagacttccttattcatgtgtaaagtgggtctagtctactgtttgggtcaaggactgatggttggtcacatgaacgtgtgattcaaaatttccataaatggaaagaactaccttgaaagtttttgaacttcttgcataggcagcactattgtgagtgaagttttgaaatgagttgagtgtatcatcaaaacggtagatcagtagtttccaaaagttatgagggtaatttaagaataaaattatttagataaccacatggagattttaaaaggtcaggatacagttttgcaggcatctctggtgggcattttttctagtcctggtttatttctactattatctcgagcccaggttttgtcagtaaatgtagaattattacttaaggtagcttgcctagattactaatatatagggaagggatataactcctccccctcagactagcttcatttttcaccttgtacaaggccactgcgtgtatatgaatgcaatttattaaatttatggtgagtctacttttgtacttcgctatttcattatcctcttgtatttttatatgcttctggagagcatgaaatatgctgcatatggagtaatctctcctcaggaagctagtgttttgtgatcttaagaagaactcaataaatattttctgaggcaaaaaaagaagatgattatggtagctcagacacttttccaatttagcatctgaagataacaatagtaaatatgatgaaatcatattaagaagaattttatgttttcaacgtagacaaaacaagaaaaaaaaaaacctataatttcaccaccaaagaatagccagtgttgagaggtcagactgagatggggaagtggctcagtctataaagagctagctatgtattcatgaggggctgaattttatccgtatatcccatggggtggggacagctttgcttgctggtacatgcttgtaatttcaggactagagaggtagaaaaaagagcagactcctaaggcccgccactcacctggcctaagctcctatggtgagctatagatcaggaagagaccctgtctcaaacaaaactacacccaaatcaggatagaagatggatcctgagatgccacagccaagtctgtccttttgtttctgtacatatgaacatgtgcacagaatatgcacatacatcagtgtatataaatacatatccatgctcatgaaaagatgttacattattttcatgtatatatagtttatgcaaactataatttttattcatagctgagaccacatagtacttgtacatgtttgcgtcttgagattttttttcatttcaaattaaagtatttgtaatcaccatatatactacattgttaggtttcaattctacaacaaaaagaaaaagaataaaagaactctttatgtcaagaccattttccaaaacagaatatttacttgaaactgtgacttattttctcattttacagatttattttattgtttaaaggtttctttctttatttatttattgattgattgattgattatatgcctgtgtgtgtgcttatgtgtgcagaagcccacagagaccttcagcaggcgtcagatcatcctagaagtggagtttcaggtgattgtgggctgcctgatgtggttgctgggacctgaaccattttctgggtctctgcataaaaccacacatgctcttaaccactaagccagctctccagctccatatttattgtattcccaattatgtatatgcacatgtttatacgtgagtacatgcacgtctgaccatacccaaggcccaaaagagccctgaagctccctgaagtccaactgaagccccatgctgtggagctaaatttacaggtgacttagctaactgacatagctgctaaaaaccaaatcagggttcccggaaagagcagtatgtctgtttaatcactgacctatctctccagttccccaaaagccatttaaaaaaaaaagtccaaacaggatctcagtatgcagtcctggctatccaggaaggaacccacctggctggccctgagccctgggaaggcagcattaaaggtgtgcgacaccatgttctgatggatggtcttcttgtgttaattcttttattatctatttcttatttggagtctcacttattctattgaaatgttaacattttccacataaaatccattgttctggattgaacaatttgaaaacagagaaagtcttggttttccttttgactattttcaaggcacccagtacttcctgccaaactgcttttaacaaattttgtccaaatattttctctttatagcagtgcattcactgtaatattgccaaatacacacacacacacacacacacacacactcacacacactcacactcacactcacacacacacacacacacatgagagagagagagagagagagagagagagagagagagagagagagagagagaatcttgagtgattttagcagaaaaaaaatcccaacttggtttagttttcgaaaggggtttgggcttactgctgaggtccagctttttctaacatgtttaagatttttgttcttttgtgaattgttctctcatatacttctatgtgcttttcttatttattgaactaattggctgttttatcttataaagtatgttatttcctgcacaaaaggattttcttttgagaagtctggtaaatgcagtgacagatagcagccatagctgctgcttggtggactgttgcaattctgctctgactaagccccgttactaaatggtccctcttcccgttagttctgcattgtgcaagcggggtctgggacagtcactggtcttcccactgtctccactattattagacaggtctgaaaagaaccgtggagttggcgccgtgggcatattcagtttgtgttgctctttgagatatggagggtcgcaactgaatcgatacggtttgctcctcacttgagcaaattgtcaacagcttgtgtgtgactccttaagagtaatgagaacctcattttaggagaggggacagattgtgtctgtacttggcaacccacatcttgctgcagctgggattgcttgtgacactccatggagctcaggagtgggctcatctgacaggaaaaaaaatgtccattttgtctaaggagttgctgaatctgtcagcatctggaagggacacgttccctagcctgtctttcctcttcaaaacactggataggacgaaagctgatgtaagagctcaacagtccctgtcattccctccaatgtcttgtcagagaactaaatgctaaatgccttcagacacgttgtaagatccggttcctccatttagcaaggcacgtttaaaaatcggcaccaaagcaaacaggtgaattgtcttaaatttgtactttgaaaattgtacttttttaaaaaaaatgtgtttgtgtattttgccaacatgtatatctgtacaacgtgtgaatacctggtgcctgtggaggaacagagatgctgtcagaaccccagaacttgagttagatgcttggaaaccatcatgtgcatcctgggaatagaatccagggcctgtggaagagtacacagggttcttgaccactgagctaactctccaattccacagctaggatttttttaatacttaaaaaaattactctcagacaggaacagttatgggtcagagttgtgactgtgggatggcctccctcccttatttgatgcactgtcatcctgctagaagtgggctctataagttccctctctttactgtcgggcaattcatctaaggtccctccctttgagtcctgagagtatctcacctcccaggtatctggtgcattctggagggtcccaccaaccctctactttctgaggttgcctgtttccattctttctgctggccctcagggcttcagtactttcccctcacccaataccagattaggttgtcctctccccccactccctcctccccctccagccactttccttcccagatccctccatccctcctcccacttgtgattgctttcttctccctcccaagtgagattgaggcatcctcacttgggcacttcagtttgttgacctttttgagttctgtggactgtatcttgggtattctgtactttttaaaaaaatctaatatccacttattagtgagtacataccatgcatgtccttttgggtctgagttacctcactcaggatgaaattttctagttccatccatttgcctgcaaaactcaggatgtcctcctgtctgaggatatcctgtctgagatggattacagggatggaaatagagaggatcctgaggaaaaaaagggtccagcaacagacccaaagtgagatctagctcaaggggaggtcccaagtcctggcactattacctttggctatgaagtgatcacaaaaaggggcctaacgagacagcactctggaagacccaataagcagctgaaagagtcagatgcagatatttgcacccaaccagtggacagaaacagctgatccctgttgttgaattagggaaggctgaaagaagctgaggagaagggcgatactgtaggatgactagcagtttcaattaatctggacccctgagatctctcaaacactggaccaccaaacaggcagcatacaacagctgatatgaggcccaatacacacatagagtagagaactgctggatatgtgttcattcagagatgatgcacttaacccctcaagaggctggaggccccagggagtttagaggtcaggtggggtgggggtggggtcatccatatggagacaggagagtagggaggaagtatgggatgtggaacagtccaagggtagacggggtgggggtgggggagaaaattaaaatatggagtgtaaaaaaataaattaaaaaatactctcatgaattaaatagttaaggtatggctggcatcataacaattattctatagcaaagaaaacaaaagcttttctcgtgggagccaaggttgtttgcagaatgagtaagagtagctagaaatcacctgatcaggaaatctttcataaacagcactttttttttttaaatccagattttattcttcttatgagtttacagtgcctccctatttctcatgggattagatttagatttattctggccatattgtctatgcaagtttcacttcacttttcaaaacaagcatttacatatataaatctatgtatttaaagtccaccattggatgctttgatgtgcatatgcattgtgcactgatcaacctcagttcagctaactgaaggctcatgatcttggtgccattgctatcattatgtatgttcatacatactgaaacactgcaatacaatttctagccagctttcttggttctacctcaggaagcttgcacatttactctgcaggaaacaaagctactccaggctctgtgtatatgattaacttgcacatctacctgctgttcagtaatctcctacagcttttcctcctcaacactacctcagctgatgtagccacactattcacctctgtattgtgtgtgtgtgtgtgtgtgtgtgtgtgtgtgtgtgtgtgtgtgttttatggaatgagagcccactgtatttgataaacaatatagctggcatccagcctaacactatccctagtgtgatctatctatccaatcttgtggataatagttgaatttctctggtctcttttagcccctgtcctttctagggaaaagaatgctaaatgcatctcaatgctaggttgatagaaaatttcccatgcattgtggattcaataataattatctgatactttcatcctaaaacattaaacagatttttgtgacaaacatgctttttctaggcaatggagaaacatgtgatattgttattaattttatattttaaattaaataataaacacataaagcagactcctatgttgtggtatagctcctaatctttaagtaagggattaaaaacactcaagaagatattttccaatcttcaaagaagccattcttggcaatcaaaaaacctacacagataattgtagtgataatgtttgaagtgacatccttatggcctggtgactgtgtggcagaaggaggttatatcttgtttgggaatgtagtcattagagtttttttcattatatgtgtaaagctctgggtttgatcccagcattgtaagtaaaataaaataaagtgatgataagataaagctatgtgtggactgaaatctggcagttgagaaagagaagagctcagtggagactgagttgagatcctgggaagaaatccaaaatactgaaaaaaaaaaaagtcatgaatgtagaaataaatgaatgcaacataaactggagatgcctcattaattgcaagttagtgctggagtgaaatgagttagggctggaagaatagaatatttacactctctgacctcggcctacagaatgggatggtgccattcatcttggtcccacggtctgaagacacagtctggtcacaatgctcacaggaaagggcaaaactgatactcctgagatgggaaacaaagcagaaaagaaggcagcactcccatctttagggtctattgaaacttgactactattctgtaagaaagaaacatgccatatatcatatgtcatatatcaataaaagctgcagtgtgcactgacaactccattaaccgtgcacttgccacaagccagaaactgaattaaatgcttaatgaagggcctttcatgtaatttttccagcagtctaatgatatagacatcataatattctcacttcacagattaagaacctgaggcacatgctcttaaattttaaataccgttttttaaatttaaataaaaaattcaaggtcacacactcaattattggctaacagattgcagttttcctttggtacccatgagacattgatttgacaacctctgtggatacaaatatctgcagtgctcaagatctttatataaagtgacattgcatttacatataacttgaagaccatctcttctgtgatagagatcacctgtagatttttataattcctcatacaatgacaatagtatgtaaatagctgtcatcctgtaatctttagggaatcgtaatgataaagtatttataaatgttcagtgcaaacacaaagtattttaaaattcatggaaccccacggttacttgtagatccatagggccagctatatgcctgagtatcacaatatatgtaccacaggctatgctgttaaaaactacttcttgtttcttatcatttaaccctgccatttggttttacacttcgtttatctagatgattctgaaaccccacttaaaccatggctacaagattacattgagggacatcatcctgggatattctttgctactatgagttgtgtaatagtgaaaggcacatgttttgggtatcagaacaaattaattctcatagaagatctgtgatttctaaatttgtaaggtgcttcactttcctgaaggcaggactggatcagctgacacctttgactgaatatccatccaagtgtatcatttctttttttttttccattttttattaggtatttagctcatttacatttccaatgctataccaaaagtcccccatacccacccacccccactcccctacccacccactccccctttttggccctggcgttcccctgtactgaggcatataaagtttgcatgtccaatgggcctctctttccagtgatggccgactaggccatcttttgatacatatgcagctagagtcaagagctccggggtactggttagttcatattgttgttccacctatagggttgcagatcatcatgtgctttggagggcagggatgctggcacatgtgtgaaagaatatacatgtataagtggataatgactaatactccttaaatggtatcataaaggcatgaagagaagcaatattctcttgcctcttagtgtaatgctgatatttctgttgaatcttagaccttgctgtcatcaagggatcataagaaaggggtggctactgcctgccctcccatgtgtcaatatccctcctatgacaaacaccggcatctttactttggaaatggcagtgtacttctgactcatttgactgtccttgggattcttttcctcctactgggttgtcttgtccagccatttgccttgtctgttgtgtcttgttgtctcttggaggcctgcccttttctgaataggaaactgaggaggaatggagccagagaagagggaagctggaggaaactgtggtcagggtgtgttgtatgagagaagaatctattttcaattaaaaaaagagaaaattgtatattgcttttgtttatcaccactaaggagaaagaagcatatagagaaatacagaaagaagagatatatatgatacagtcttctgagagtcaaggttgacggatgatctgttcagaagcaggaaacattcttgagctatgtccctgtgcattggcagcttataatgctgtggacatctgtgggtaatttatcactagatcgggttctttctgctctgtcccattattacaggctatctgggagagatactttctgaactattgacagacacctttgaattactgtattgaaagccatcaagacatttttctccctttggcttaatgtccttgacttcagcactctttgaaagcattttggttctgttggatattgtctgagcttctataatgggagtggataatatattaattaatatgacggcttttgcccgcacagctcaggctccggctccaatagctttctttcaatgaattcactgcctggggttgttttcttttcactgtaaaattgagacagcctctcaagcctggagcaccttccaatctaccaaaaaagcctggagcaccctccaatctaccaaaaggagcaacctcatgttacaaagcaagctcagtctaaaggcacacccatcgagcccagggaagtgacttgttctgctagggaaaaaaacacatttctgggcttattgttattttaattgcatacaggagagtacagaggaaggggtgagatggcagtgacccttagcttgtccggggaatgacgtgtgcatggaatcctgttctgagggagaaaaataactaaaaataaaagacatttacttagaacctctagggcaaggtgcaaagagcctgtgcggtagtagccaaaattaaaaattaaaatgcttgagatctgcagagcagctgccatcagcagagccatgggctttttctgggtagctttgtacctggttaattctgacaaattgactctgaatgctaattttcttcagtattttgtgtctttgctggtgagttctttgtagtcagtggatttttgcattgacttaatccaataaatgcttaatccaacaaataacatacagtaaccaaaataggattgtatcttttcaaagtgctattcaagtcccaagtagtaggagttaaatagacctgtggtctgtatatactatttctgttgataatctaccaaatgatgatataaaacagaaaataaggcttaagcatggtataagcagtgtctcaaattatctacttatatggatcaatgaagagagatcagctctggaactagatacatacacaaacctacaaaacaaactacaagtggactcagcaagttgtttttatcaatgtttgtgcatatacatacatatatgcatacatacatgtttacatacatatatacatacaactcgacaaaaatagtcaaaggaaaaaaaatgagatcagcttgagggttgggtcagaaatgggaggagtttgagagagggtagctgggaggagctggagggaggaaatgaatggagaaacgtaatataaattctatttcaattaaacatacatgaaaataaataaatacaagaaattatttataggtgagaaatatatacttccacgtagaccaaactggtgcttctgcctcctgagggctgacattaaaagaatgtgtcgccatgcctggctatttctgtgctttagagtgcagttacattttccatcccagtccttccgatttagtttagcttagtttgaacatgattggtattccaagggcctggtgtaaagtcttcaatgtgctgtcggaaggtgatggaacctttaggagataggatctgatagaaggttctgagttcactggagagatttaaaggagttggagatttaaatatgatcctttggcaaatcttgtgtgaaatggatgctagtgacttgaattttcatgagaggattattataacaggaacaatcatggcccctcccgtgctctttctctctgatttttttaggggggtgtgattacttggttctacgtaggtttcaagtagaatgtgtcaaaatatcctgctctcactagaggctagaaaagtcgtttggcctcatcttggactctgaatctctaaaatgatgatctaaataaactccttctttatacacagcactggtaggctgactaatgtatcaccctattgaacagctgaaggagatattcaacattaggagtacaaaggtctagtgctatactggcccttgtgtacaagtctcagaacttctttgagtccagacccaggtggttgccttcttggtgataccttttaaatcttgatgatgtttctaaagatacatattctcatgagctcataagaagaatgtgcttttacatgcaatgagtagtcaagttaaactatctcaaaatgattgttcgcctatcatttgcaaagaacatcagatgacacttcacaatcaaacaatatctactctgcaaaggactttttcttaacactgactctggttttcagcatagtatatgagtgtgatgatagcatttatatttacagaaaagggcttacagccatctgggtcagggtgcaaggtggagcactgcgagatcttcccgttttagcaggagaacgatgatcatataaagggattttcaggcagttattttaaatttctttttcattatttggacttattcatgctttgagtagtaagtgggactgtaatttctaaccctttaaattctaatatctagcttaacttagaatatttaagatgtgtggttcttctgagtttatgagtagagaaatatttggatatttgttttctcactccattttccagtacaaatgaattgtttttcttcataaaaaggtatgcctgcttatacttcctcagagcacctttgtggagaataggttttcaatattcatttcaattctatttctcgtgaccttacgtaggctccaagctgttagatcttaagtatgtgagctcttggagctgagcagtaatttagtgacatttgaatgtcatgccttctcctcagctattttgcatattacaagtagactaaactttaaggtttttataaaaaaaattacagaattacagttggtgattgtgtcactggaaccaattgcattttatttgttcttgaatggcccattgtactgagaaccaggcataagtttctgttctgacaattatgccttagtgacaaggtcgattacttgttgtgacctaaatgcttactagaagacacctcctcctatatgaagatataaagcaaacagggccaaaagttgcagaagctgtagtagcctcatgctgtggagctgtggtcagcttctccccaaggcttgtaatctcctgagcaacttccttctgaggagagttgcagagtggagaaacatctgcaggagtggcctagctataggaatagggttaggggtgcctcagaaaagccaccttgcctggcagtgggccaaggatggccctttcctgccatgacttaggccacgcctacttgtcagttagcagtctaggaagagactgaaagcacagttgtggctgttggagccacatgtcccctctgtggtggtgcttcttgcatggtggctgccagctgtaagtggatcaggtatgtcgcccctttcctgagggcaacccagaacaaagatgtaaggctgtggggtcaggcaagtgcagagttgggggtggggggtctgaatttaggaagatgtggacatttctttttggaatcagaagctgacagatggttgtgataactgtatcaataaatggccaatacatggaagtttggcactatacttggggaattgatggagaaagatgtttttgaaagaaagattagaactgttctgggtgagttgggatggtctaggatctatcctgttttgtttgctctactctggaagtaaagttcctaaagtttcaagtctctcattactaaaaccaaaagttgccaggtcaccaaagttcttcctaggaacctccttaggggtgagtcagacattcttactgcaactgccacggtactcccaggctgcttcggacccctgtcgtttttatcttgctccactcttactctctgagccttcatcccggtacctctgccttccctgaggttccttgaaatatgctgtgtacgtacactccttctcagagcctttccacctacatttccctcaattagaatcttcttcctccagaggtccacatgactcatttcctcacgtccctcctgtctctgtccaactggcactttagaagagaggcttttatggctgtgctgtctaaaatagaacattcacacattccccatcgctttccttccacttcccctgccatcttctccccacccccagctcttaggactacagattgccacatcctattaagttgaatcataggaaattgtctcgcggtgggtcaggaagagccgaatgttgaccattttgtacagttgaatctaaaataaatttattaatttgtttattacttttatagattttttaaaacatgagttcaggagtttgtttggattttagtcacatctctagaatttaaaacatagcaagcatttagaaaagttccaacaaatgaatgtaaatgaagatgcaagctagtgggatttgttgagagtaaacagagaaaacttaaataggaagtgatttttgtatgtgtgatctagaggaaactgcagaataaaaggatttctgagagaatctagaaaattctgaaggatttctttgaggccaagtgaaatacagtttctaatttgaggtctgggctatctatgggcttaaattataggtttcccccccccctgggtacttttttgaaattgagactaggataaattatatggctttaggcctttttatttttacttgtgtgcatatgtatttgtctatgtgagtatatgccatgtttgtatgggtgtagacagaacatacctgaggacccagcaatactgggcatatacccagaagatgctccaacatgtaatgacacatgctccactatgttcatagcagccttatttataatagccagaagctggaaagaacccagatgtccctcaaaagaggaatggatacagaaaatgtgttacatttacacaatggagttctactcagctattaaaaacaatgaattcgtgataaagttgatttttattagggaaaacagttttagtctggttctacaaaatacaatcaatggtctaaaaaccatccatgctgtggttctaggtcttagacagaacagacaatctgttctatgcatatatgatagtaaaaggtaacaaaggcatcaccatgagtcagaaataaagacggagttggaaagcaaggcatttgagtcaaggctgtagctgctctctgaagtgtcccatatgcgctctgtatatggcccacatgccaaggattggtttcagcaacaaagtatagataagaaatgcaaaactgccgcagggaagggggatgcctggaggaaggagcaccctctcagaggagaaagggagggggagatggggtggagaactctgggacaggggactgggagaggggcaatatttgggatgtaagcaaataaaataattaatttaaagttatgataaaaagaaatgcaaagccgatactgtggattagaacatagacatttagcatacagttgtgtggcacatgaatgaaagagactagggatatagctttctgtatggaggaggctagaaagtcatgccttacagagctgtatattccacaaagaatattggtgtagatttgcacttcctgtggacttgtgattctaactcatgcctcatatatagaaagaaaaatcacaatttgaaaaacaagcccctggaggctcaggtttctttctttctttttttttttttaacactcctatggtagttagaaaaattatttgcaatcatcatgggagagtgatgcaattaaaccaagttttacaagatttccagagataaaatacgtgtgaaagattaactcccaacctcaaattataaaacacttaaaaaatccttccataaaagctagcatagcagagtggggtcaaattcttacatcttcaaatgttacagagatcatataagatgaccctgaaactgaaacgtaatgagttgagtgacctataaatgtaggaaaattaaatgtgctaagcatgagctagaaccttcaaagggaaaaatgcaaccgtgaaagtgatacactcttcaaaggcaaggcaagagcaaccatttacagaagtggagcatttaaagaaacaatgaaggcagcacagaagaactgagctgaaaaatatcaatgaggaagaaacatgatggggagtgagaccattcataaaatctttaataagcattcttgtaggcagtatctgatcataatacatgtgacaaataattttcaaaggccataagtcaaataaatgagaatgagtgaaaattataaaatacttaaaatgaatgctaatgtgcacttatgacaaatttacaggaggtaccaaaagtgatggttaggaatgtacaacctcacgtgcgtgtgtttgtaatgaaaagataaagggtgaagattcggaggctcagcatccaattaaaggatttagaaagcacacaggaaaaacaacaaaacaaaacaaaaaaaatgtttaaaatatattccaggcagaatgtatgcgttaataaaatagaatccccaaatccaatccagttcctgaaaggcctaaaaagtaaagtgactcataataagtttgagcaagaataaattcagtgataatgtgtcagaaataatgtcttaatctggagcaagagagtgatggttccttgtgctacgtatacactgatggcaggcagtaagtggcactgaatgtaaagtagcagaggcacaaggggacctgagacactagattatcagtgattaaggacaagagactttacaggacagtcatcagaaacaatgcaaaaagtttaaggaaacagatagactgcatattgatagatttgtatattccagcaaatgcctaggaaaataagtttaaaaggaactattacggggggaccagtgagatggttcatctgggaaagtgttagctgtgtgtgcaggcatagggacctgagcttcgtctcctagaatctatgtggaaaggttggacacagtgctgtgtgcctgtaattccacagctcggcaggtggaggagggggagctctggggtgttttcccagacactccagctgactcagtgaattctgggttcagaaagagactctgccccgccccccccccccccccagtaagatggaaagtgattcagggagggattcaccactgatctctggcttcctacacgcacatcttcatgcacatctacatgcacacatctacatgcgcacatgcctgaatgtccgtgctctgcctccagtgtgtacaggttccaggccttcctggatttccataggttgaagaaatgagcgcaggctgctcaattttgtctgtcctaaaagttttcactgttaatgtttaaatttgtttttagcacataagactattatagacttattttgagaaatttggtgagctaattctgaaggctatatagatatccaaggaccagtcatagccaattaattcatttttgaagatgatcacataatgcaagtcatggtcatggttgtgaaattagtctgaacagaagtagtaacacggtatataacaaatccaaaaacatgcgtgtctaaggacatgtgagaaattcaggtcatgagaaggctgcaaaaatataagtattcacacttggtgaataaaaataacagggggccattctcatggcatacacacatgaaaatcggggtgtgtgagggggtcagaaatagcagttaagagagcatattgcttttccagaggaccggagctagtttccaggacccatgtgggaaatctcccagttgccagatccagggggatctgacacctccagcttcttggatacttgtactaatgtgcacacatctacacaaagataagtaacttaaaaaaagacagtaacaaagtaaatcttaaacaatcccaggcacagtgtagagagaaaggtaaaaattaaaaactttacattgttctcttatctaggatcactgaataactcagggaagaattttctaagacattgaagcacaacctgcaaggaaatataaactatagttttaatatattgaaagaaaacctatgcatagctaaatataccaacaatattaaagtattaaaagtttcagataactgttaatgaatataaccaacaaaatgagtacacacatatctaaatatttaaaaattcaactgagttatatgtgaataagacattaacagaagagaaaatataaagaactcacaaatgcataaataccttgcttctcacactaataactgggtcaataaaaattaaaactgaaattttcatttcaaactcatcactttgggaaaaggaaaaatctaaaaatgttcaatgtcagtggtgacgtcagagaataaagaggaaaaattgactagggatgtgtttaaaactgtttcaaaaagtgagatggtttgacatgacttaacaaagtgaaacatacacatcctaaagagagaattccaattctaggcataaatgctcgagacattctatgtattcgctgagacacatgtacaaaagaattatttcacactgttttgtaagagcatgatcctgagaaaatttatatatttccaccaacagaagaaaactctctcggagaagaagggggaatggagaggactctgtgagggagcagcaggaaatggggagctgcatttgaaatgtaaattaattaattaactaaaagagaataaaacacaaatcaaaaccatatattcagatagtagagtataatatagcagaccccattctaaattgcatgagatatattcccatgagtaaggtacaacatcataaagataagcaagaagaaattaaacataaagaactcatagaaggatgcacatggcagggccatttgcctaatgctttagaccatgcaaaacagtattctatatttttaaacaatgtggtcatcgtaaacaaaataatttttaaaaaatggaaatcctaaaccccaatgtttaggataattctgtgaatagaggtgaatgaaggaggagagaaatgggatgaagggcccaggaatgcacccactgaggcttccatctgtctttgaggtttgtacatctccaatgttttattggataatgacttgagatgctcaacacatgcaaaggctatacagggatgtactgtgtaccttccctagcttctgctaaggattatagcttgcatgacagtagtacagtatcaagtccaaagctggacattggtcctgtgtgtgttagctctgtgttacctctgtcatatgtgtagatttgtgtaatcatgctgtcaatcaagagtcagcggacacatcactacctagatttctttgaccgtgtgctcagtctttcaggccattttatgaatgtgcatgcagttgctttttgctgctgttgctagtgttgagtataatcattcacctgtggaagagcatttgatattttcatgttttgacaattatacacaggtttctatgaccatgcaaagatacacaggtacagagggttttttgggtagccttgtacttctctagaaaggatgctctagaataaattcctgggtagagtggtaaataaagtgtgtggggtttgttccaggtcctttgctattccctttcttctgcttttctgtgctgggatcaaaccctggacattgcatggtcaaggctggtgatctaccaccgagccgcctgcttacccaggcttctttatttatgttggtttttcagagttgtgttaaccttggccgggcacgagaggtctggtttctctgtatcttggcaaatatctggtatttccattgtcctgttggctttgcaataaagtattatcatcgaaacttgtataaatcacatggatatctcactagatttttatggatgttgtaataaatgcctgcaaactgagcgacttaaagcaacaactttatttattattagatattttctttatatatatttcaaatgctatcccaaaagttccctatactcaccccccccccagccctgctcccctatccacccactcccacttcttggccctggcattcccctgtattggggcatataaagtttgcaatacaaaggggcctctcttcccagggatggccgactaggccatcttctgctacatatgcagctagagacacgagctctggaggtactggttagttcatattgttgttccacctatagggttgcagaccccttcagctccttgggtgctttctctagcttctccattgggggccctgtgttccatcttatagatgacttcgagcatccacttctgtatttgccaggcactggcatagcctcatatgagacagctataacagggtcccttcagcaaaatctttctggcatatgcaatagtgtctgggtttggtggctgattatgggatggatccccgggtggggtagtctctggatagtccatcctttgtcttagctccaaactttgtcacagtttataggtttgaattctaacattggtctctctgtgttgaaatcagtgttagcacagcatgttccttctatagactggatggaagaatcaatgtcattccttcttctagctcctagagactattcacatctattgactctcagctctcctttctttatcttcacattaaacaactgtgggttgagttctctcctgggccatattaccctgacctatttgtttgtaattcagctccgcagagctgtatgaatcatgcttataatacaatatgtgagtattatttatatattttatgtaattatgcaaaataattatgcaaataattacaccattgtattttgaatacaatgtattcttttttgttgaaatggggtctcattttatgtttaataaaaactccttatgttacctaaactaacctctacctcttggtgcttctcctgcctcagcctgctgagtgctaagatcacaaacaaccatgctatctaattgcatggttataaactcaaacaactggcataccttcttccatctctggtcttaattttcctttgccaggtagtgcaacaagtttacccctcgtttggaatagaaaagtgaggagctgtcatagaaaagatggaaagcaaaatgtcacatggtaataggccatccacatatacgatcagcaaaatgactttgtcttctgactgtattccaattccatgggtctttaagagttctattaagttttaaatgtttattcaatgtgaggtttttgtcaaagtgaatcctttccctgatgtttgagttataaatatttgcctgtctttcttctcacaaaaggggtttatttttatttttcttatatatgtagtaagcatgtactaatataaattaggaaataacttggacaaatggatcttattgatgatatacaacattgctaaggggaaaaaactcacaaagtattatcctaatcagcttgttgatatttttctattacaaaatcatgactttgatcattattctaagagtgcttgactaagatcattctcttctgcttttttgttttgttttttgttttttgtttttccgagacagggtttctctgaataactctagctgtcctggaacttactttgtagaccaggctggccttgaactcagaaatccacctgcctctgcctcctgagtactgggattaaaggcttgcgccaccactgccaggctctcttctgcttttaaggctttgtaatccccctttctgtacccaagtacctattcatgtaagctttgtacaaatggtgagttgctggttgacgtttatttttcttattagtagacacctgtgtgtgttgttttagcttccctctccacccaaggcttttctttttctatataatagtttcctaacctttgtaaaagaaactggtctgtcaaaatataacagaccatgactgttatccaagaatgatggaggttgaggcaggaggatcattacaagtttgaagccagccttggctacacagagggttccaggccaggctcgactgcagagtgagaccttgtctaaatttgttttggtcatattaaatggagtcaaatttttgacagggtctcacttttttttttaattagatattttctttatttatatttcaaattttacccccttccctcatttcccctgtgaacccacatcccatactccctccccctgctcactaacccacccactcccacttccctgtcctggcattcctgcaaactggggcatcgagcctttacaagaccaagggtctctcctctcattgatgttgcataaggccatcctctgctacatatgcagctggagccttgagtccctccatgtgtactctggttggtggtttagtcactgggagctctgggggtactggttgttcatattgttggacatagtactacctgaggacccagctataccagtcctggacatatacccagaagatgctccaacatgtaataaggacacatgttccactatattcatagcagctttatttataatagccagaagctggaaagaatccagatgtccttcagcagagaaatggatacagaaaatgtggtacatttacacaatggagtactactgaactattaaaaatgaattcatgaagttcttaggcaaatggatggaactagaaaatacaatctgagtgaggtaacccaatcacaatagaacacacatgatatgcattctcagataagtggatattagcccagaagtttggaatacccaagatacaatccacagaccacatgaagctcaagaagaaggaagaccaaagtgtggatactttggtccttcttagaagggggatcaaaatacccatgggaggaaatatagagacaaagtgtagagcagaaactgaatgaaaggccatacagtgactgtcctacctggggatacattccatatacagtcaccaaacccagacactattgtggatgccaacaagtgattgctgacaggagcctgatatagctgtctcctgagagactctgccagtgcctgacaaatacagaagtggatcctcacagctgtccattggactgagcactgggaccccagtggaggagctagagaaaggacccaagcagccccagaggagagtctcacattgtagatcaggctggtcttgagctcatggtaaacctcctgccttagctaccctagcactgaaataaaggacatgactcatccagtttatcaagatacatttatctttgatttcataaaagcaaagagaaatataataaatgactaaggcttattaagacaaaaaatattatttcaaatattatttttattagattgaaatattccaggataataacaacacaaaatggaattatttacacccccaactctaaaaggtaagggtaagcaccatagatagaagcctgatagtgacgtgactttgatcaagaccagttctctagcagggcattgtaactcacatctttaatcccatacctggaaaacagaggcagaactcaaacaggtgagtttgaggccagcctggtatacatagtgccttctaagacagccagtgctatacgagaccctctctcaaaaaaacagaaatataatagacagataggcaaatgacctcttccttatctaggcttcagttttacttcctgtgtacaaagaggctacactcaagggttcctagaggctttgcccatgctgatgtcagaggcagaatgtgagcactaattcctgggtttggaaagagaggggcgggaggacccagaccgtcaccatcctggcttagaatctaaaggagaatagctattctccatgcatcttttgctagttacaggtttcagaattcattggtttgtaggctgaggaagccttgtttcaaagcacctaagtttcattataactgtaactagtcataaccacatggatggtatcattaaaaccaatcataaaaagtatcacactcttcccaatttcagaatgggatgactaaataatgcctcttcagatttgattttcaaaatacaaacaagtcaaaaaaaagtctaaatgtccaacagtgccaatgaggctttcaacctctaaggagtgcttacagccttcttagaacaagcacattgtaaactgattatatgaagatattgattatgaggtttgagttgagtttagctattatattttaagcataacaatgaagtttctatttatttatttatctagccaactttaaatctgtaatctagtgcagtctattgtttgggttttatgcttcatcttctcagaagttatctgaagagactgaaggcaaaaatgcagcaagcagagttttctaatctcgtcacttttggtggaaagcaagatttttatcatcagaaaattttgattagataaaataacaaaggattaaacatccatctactacatgacactgtctttaaattcctgaaggaaataagcaatagagaatagaatgattaaaagccaagaattatggaatcagataattcctgaaaaaagagtggtgctcttgtccaaggatggtttccgttcaatgtatacacttgaaccagcactaatggtatcacgttcaagagcatgacaagcccagattcttagactgaatcccaggtttactgaagatgagtctgtactgacagagaccttgaactatatgtaatgtagtatgccaaaatagaaaaataacactggtgggacattggtgaactccttaaaaactccacagttaacttgataacattttagcaacaccagcagtttagttatggctatgtgatatggttgtatattatgataggttagaagtcatgtggagaatatgtgggaatcctatatattttcctttcaacctttctggtaatttaaaattgttacaaaataaagatttgtttgttttttagagtcgtcattccaggctatcaaataataatttttagaaactttagattttctatcctacagctcagaagcatttcctggtgattcttgagtgtgctaaaaatgcaaggatcccagtatagcattctctttaaaagttgccattctttacacagtgtaatagaaaatgtctggctttgatctgtaagagccagtctatggtttgagacaagactattataagatttcaacaatgaggaacaaagagggaacacaaatctcacaaaaccaaaaaccaatagtgtgcaacttgaaaagtaacaagaggtctatggaccagtaagagaacaccatttaatgaaagttaattaaaaactcatatattcaaaaaaaaaaacaaactcatatattcaactatgtaggaaatggcctaaaggtatagaacaaatgaggaaatacttactcaagattatctactaaaccgggctactcagtgagattttataggacttaagccacagtccactaactaaccctctttgtcctattagcctagcacattagatgctgtatttgagattgttgtagtcaaagcgtgtggctcactctctcccagcatgggagtctacctagaagaggtggtccagagtcattttttatttcatccttttgctgattgatgtagaatctttcaggcgagaagactgagagatctggggcccctttcttcactaacccatctcttataggatagaagttagctccagaaaaggcagaccatggattataggatctaattatcttactccaatctgcctataggttagaagtatcacactgggagaggcaagcatgaaataatagggggttctgacccctgtgagcacctggcttataaagccagagttagatagttcaagaaaaattagtttctcaaattcaaaaactggtataggaccttgggaaagaggcaagctctgtgacagagctccatagtctattcagaagaatgaacttcatgtgaaacagaatacaaggaagttcatgactaaagtattgttgaaaataacagaagtcttgggagtaggtgattaagaagaaattgtcactctgtaatagtgactcactaactattgtctatagagaagtttatcagagatgatgaggggaagagacagctaagaagagctatttggggccataaatcctgtcctcaaatactgtcacaggcaggagcttaaatttgagtagtttggaccatggggcattgtataacccatggcagagtgcacagctaataaggaatgatgctaagagtaggatgaggtaccagtaaaggcagataaacagggatgggacaaaataggtgaccatgaagaggctctctaaataactgtcacttcctgatgattgtgccttgagggtgacatcctgaagggaaaacaaactttacagaagtagtccaacatgctagagaattgagaagactgacattaacaaaaggctagggtgcaaacatcagtatctagagttacaaagatccaggaacgtattttcaagcagagaatatttttcatcaaaaaaaattaaaagtgattcatggcaacatgggaagtttcacgcaaatgcacagggggaagtgagtcaaaggagactgcatttgaggagcctggggtgtcaggatcagcagacagagctatcaaagcacccactgcagacatagtccaagaactgacagaaaccatactttcttttttttttcccaattttttattagatatttccttcatttacaaaaagatccccaataccctcccccccccccccgccctgctccccaactcacctactcctgcttcctggccctggcattctcctgtactggggcatataatctccgcaagaccaagggcctctcctcccattgatagcctactaggccatcctctgctacatatgcaactagagaaaccatactttcaatgttaaggaagatatgacagatttataaataatgccattgcaaaggtggaaatgataagattgaaccaagtggaaactataattgaaaatgaaagtaatttgggtttgaaaactctacagagttgggtcagtgggatctatgtttggagagactgtgcagtttaaggaatccagaaggggaaaaaatgatcaagaaaatatatttagaaccacaaggaagtatgtgacaccatcagtcacagcaatcattgtataattatagtaccagaaaagaggggagaaaaaatatttgaaaaagtgatgcttgaaaatttcccaagcttaatgaaaaaacatcagtctacttatcagtgaaattcacaagctcctggtaaaattaacttatgaagatccacaggggaggaacaagatagtaaaattattgaaagacaaagaacaaatcttataagtaggaagaaaaaatgcatttgtaaaaccctccacagatggctctccaagagaacaatagagactggcagacaaacaaggttgcggaatccataaaactgagtgcaaacataactaatgaaagttcctacattcaacaaaactatcttttaatgtgaagatgataaaatagagagatccccaagtcaacagtaaattgagagcttcaaattgccagcagaactccttgcagaaatcttcatgaatcttcttcaggtgacaaacaaaacaaaacaattatttgttaaaaaaatagataatctagataaaacgtaaaagtccctaggaaaacaaaagctaccaaaatggacatgatatgaaatgaaaactctgaattcactctcaggtaaagagatttaattagtattttaattatgtacaacaaagaaacccccaaggctatggtttcatccgcatagtctaaaacaaattcaaaaaaattaacaccaatctttcacaaattctcaaaaaaaagagttgaaacatcattagtagctgttggaaatatagatagagcaacacctttggaaaatagtttggtagtttctaaaaatgggttcccatacaacctagtactcttttatactctcttagttatatatgtatattgtgtacgtgtgtatccaagagaaatgatgacatatgtcttaaacaaagtttggcctaaatattaatggtgaccttgctcagaaaacctaaaatgtgaaggcaatccaagtgcctgcaaaccaatgagcaatctaaggaaacaatgtgtatctaagtgctgatacacattgtaacaggcatgaacttgacagtgttattctttttttttttttttttttattaggtacttagctcatttacatttccaatgctataccaaaagtcccccttacccacccacccnnnnnnnnnnnnnnnnnnnnnnnnnnnnnnnnnnnnnnnnnnnnnnnnnnnnnnnnnnnnnnnnnnnnnnnnnnnnnnnnnnnnnnnnnnnnnnnnnnnnnnnnnnnnnnnnnnnnnnnnnnnnnnnnnnnnnnnnnnnnnnnnnnnnnnnnnnnnnnnnnnnnnnnnnnnnnnnnnnnnnnnnnnnnnnnnnnnnnnnnnnnnnnnnnnnnnnnnnnnnnnnnnnnnnnnnnnnnnnnnnnnnnnnnnnnnnnnnnnnnnnnnnnnnnnnnnnnnnnnnnnnnnnnnnnnnnnnnnnnnnnnnnnnnnnnnnnnnnnnnnnnnnnnnnnnnnnnnnnnnnnnnnnnnnnnnnnnnnnnnnnnnnnnnnnnnnnnnnnnnnnnnnnnnnnnnnnnnnnnnnnnnnnnnnnnnnnnnnnnnnnnnnnnnnnnnnnnnnnnnnnnnnnnnnnnnnnnnnnnnnnnnnnnnnnnnnnnnnnnnnnnnnnnnnnnnnnnnnnnnnnnnnnnnnnnnnnnnnnnnnnnnnnnnnnnnnnnnnnnnnnnnnnnnnnnnnnnnnnnnnnnnnnnnnnnnnnnnnnnnnnnnnnnnnnnnnnnnnnnnnnnnnnnnnnnnnnnnnnnnnnnnnnnnnnnnnnnnnnnnnnnnnnnnnnnnnnnnnnnnnnnnnnnnnnnnnnnnnnnnnnnnnnnnnnnnnnnnnnnnnnnnnnnnnnnnnnnnnnnnnnnnnnnnnnnnnnnnnnnnnnnnnnnnnnnnnnnnnnnnnnnnnnnnnnnnnnnnnnnnnnnnnnnnnnnnnnnnnnnnnnnnnnnnnnnnnnnnnnnnnnnnnnnnnnnnnnnnnnnnnnnnnnnnnnnnnnnnnnnnnnnnnnnnnnnnnnnnnnnnnnnnnnnnnnnnnnnnnnnnnnnnnnnnnnnnnnnnnnnnnnnnnnnnnnnnnnnnnnnnnnnnnnnnnnnnnnnnnnnnnnnnnnnnnnnnnnnnnnnnnnnnnnnnnnnnnnnnnnnnnnnnnnnnnnnnnnnnnnnnnnnnnnnnnnnnnnnnnnnnnnnnnnnnnnnnnnnnnnnnnnnnnnnnnnnnnnnnnnnnnnnnnnnnnnnnnnnnnnnnnnnnnnnnnnnnnnnnnnnnnnnnnnnnnnnnnnnnnnnnnnnnnnnnnnnnnnnnnnnnnnnnnnnnnnnnnnnnnnnnnnnnnnnnnnnnnnnnnnnnnnnnnnnnnnnnnnnnnnnnnnnnnnnnnnnnnnnnnnnnnnnnnnnnnnnnnnnnnnnnnnnnnnnnnnnnnnnnnnnnnnnnnnnnnnnnnnnnnnnnnnnnnnnnnnnnnnnnnnnnnnnnnnnnnnnnnnnnnnnnnnnnnnnnnnnnnnnnnnnnnnnnnnnnnnnnnnnnnnnnnnnnnnnnnnnnnnnnnnnnnnnnnnnnnnnnnnnnnnnnnnnnnnnnnnnnnnnnnnnnnnnnnnnnnnnnnnnnnnnnnnnnnnnnnnnnnnnnnnnnnnnnnnnnnnnnnnnnnnnnnnnnnnnnnnnnnnnnnnnnnnnnnnnnnnnnnnnnnnnnnnnnnnnnnnnnnnnnnnnnnnnnnnnnnnnnnnnnnnnnnnnnnnnnnnnnnnnnnnnnnnnnnnnnnnnnnnnnnnnnnnnnnnnnnnnnnnnnnnnnnnnnnnnnnnnnnnnnnnnnnnnnnnnnnnnnnnnnnnnnnnnnnnnnnnnnnnnnnnnnnnnnnnnnnnnnnnnnnnnnnnnnnnnnnnnnnnnnnnnnnnnnnnnnnnnnnnnnnnnnnnnnnnnnnnnnnnnnnnnnnnnnnnnnnnnnnnnnnnnnnnnnnnnnnnnnnnnnnnnnnnnnnnnnnnnnnnnnnnnnnnnnnnnnnnnnnnnnnnnnnnnnnnnnnnnnnnnnnnnnnnnnnnnnnnnnnnnnnnnnnnnnnnnnnnnnnnnnnnnnnnnnnnnnnnnnnnnnnnnnnnnnnnnnnnnnnnnnnnnnnnnnnnnnnnnnnnnnnnnnnnnnnnnnnnnnnnnnnnnnnnnnnnnnnnnnnnnnnnnnnnnnnnnnnnnnnnnnnnnnnnnnnnnnnnnnnnnnnnnnnnnnnnnnnnnnnnnnnnnnnnnnnnnnnnnnnnnnnnnnnnnnnnnnnnnnnnnnnnnnnnnnnnnnnnnnnnnnnnnnnnnnnnnnnnnnnnnnnnnnnnnnnnnnnnnnnnnnnnnnnnnnnnnnnnnnnnnnnnnnnnnnnnnnnnnnnnnnnnnnnnnnnnnnnnnnnnnnnnnnnnnnnnnnnnnnnnnnnnnnnnnnnnnnnnnnnnnnnnnnnnnnnnnnnnnnnnnnnnnnnnnnnnnnnnnnnnnnnnnnnnnnnnnnnnnnnnnnnnnnnnnnnnnnnnnnnnnnnnnnnnnnnnnnnnnnnnnnnnnnnnnnnnnnnnnnnnnnnnnnnnnnnnnnnnnnnnnnnnnnnnnnnnnnnnnnnnnnnnnnnnnnnnnnnnnnnnnnnnnnnnnnnnnnnnnnnnnnnnnnnnnnnnnnnnnnnnnnnnnnnnnnnnnnnnnnnnnnnnnnnnnnnnnnnnnnnnnnnnnnnnnnnnnnnnnnnnnnnnnnnnnnnnnnnnnnnnnnnnnnnnnnnnnnnnnnnnnnnnnnnnnnnnnnnnnnnnnnnnnnnnnnnnnnnnnnnnnnnnnnnnnnnnnnnnnnnnnnnnnnnnnnnnnnnnnnnnnnnnnnnnnnnnnnnnnnnnnnnnnnnnnnnnnnnnnnnnnnnnnnnnnnnnnnnnnnnnnnnnnnnnnnnnnnnnnnnnnnnnnnnnnnnnnnnnnnnnnnnnnnnnnnnnnnnnnnnnnnnnnnnnnnnnnnnnnnnnnnnnnnnnnnnnnnnnnnnnnnnnnnnnnnnnnnnnnnnnnnnnnnnnnnnnnnnnnnnnnnnnnnnnnnnnnnnnnnnnnnnnnnnnnnnnnnnnnnnnnnnnnnnnnnnnnnnnnnnnnnnnnnnnnnnnnnnnnnnnnnnnnnnnnnnnnnnnnnnnnnnnnnnnnnnnnnnnnnnnnnnnnnnnnnnnnnnnnnnnnnnnnnnnnnnnnnnnnnnnnnnnnnnnnnnnnnnnnnnnnnnnnnnnnnnnnnnnnnnnnnnnnnnnnnnnnnnnnnnnnnnnnnnnnnnnnnnnnnnnnnnnnnnnnnnnnnnnnnnnnnnnnnnnnnnnnnnnnnnnnnnnnnnnnnnnnnnnnnnnnnnnnnnnnnnnnnnnnnnnnnnnnnnnnnnnnnnnnnnnnnnnnnnnnnnnnnnnnnnnnnnnnnnnnnnnnnnnnnnnnnnnnnnnnnnnnnnnnnnnnnnnnnnnnnnnnnnnnnnnnnnnnnnnnnnnnnnnnnnnnnnnnnnnnnnnnnnnnnnnnnnnnnnnnnnnnnnnnnnnnnnnnnnnnnnnnnnnnnnnnnnnnnnnnnnnnnnnnnnnnnnnnnnnnnnnnnnnnnnnnnnnnnnnnnnnnnnnnnnnnnnnnnnnnnnnnnnnnnnnnnnnnnnnnnnnnnnnnnnnnnnnnnnnnnnnnnnnnnnnnnnnnnnnnnnnnnnnnnnnnnnnnnnnnnnnnnnnnnnnnnnnnnnnnnnnnnnnnnnnnnnnnnnnnnnnnnnnnnnnnnnnnnnnnnnnnnnnnnnnnnnnnnnnnnnnnnnnnnnnnnnnnnnnnnnnnnnnnnnnnnnnnnnnnnnnnnnnnnnnnnnnnnnnnnnnnnnnnnnnnnnnnnnnnnnnnnnnnnnnnnnnnnnnnnnnnnnnnnnnnnnnnnnnnnnnnnnnnnnnnnnnnnnnnnnnnnnnnnnnnnnnnnnnnnnnnnnnnnnnnnnnnnnnnnnnnnnnnnnnnnnnnnnnnnnnnnnnnnnnnnnnnnnnnnnnnnnnnnnnnnnnnnnnnnnnnnnnnnnnnnnnnnnnnnnnnnnnnnnnnnnnnnnnnnnnnnnnnnnnnnnnnnnnnnnnnnnnnnnnnnnnnnnnnnnnnnnnnnnnnnnnnnnnnnnnnnnnnnnnnnnnnnnnnnnnnnnnnnnnnnnnnnnnnnnnnnnnnnnnnnnnnnnnnnnnnnnnnnnnnnnnnnnnnnnnnnnnnnnnnnnnnnnnnnnnnnnnnnnnnnnnnnnnnnnnnnnnnnnnnnnnnnnnnnnnnnnnnnnnnnnnnnnnnnnnnnnnnnnnnnnnnnnnnnnnnnnnnnnnnnnnnnnnnnnnnnnnnnnnnnnnnnnnnnnnnnnnnnnnnnnnnnnnnnnnnnnnnnnnnnnnnnnnnnnnnnnnnnnnnnnnnnnnnnnnnnnnnnnnnnnnnnnnnnnnnnnnnnnnnnnnnnnnnnnnnnnnnnnnnnnnnnnnnnnnnnnnnnnnnnnnnnnnnnnnnnnnnnnnnnnnnnnnnnnnnnnnnnnnnnnnnnnnnnnnnnnnnnnnnnnnnnnnnnnnnnnnnnnnnnnnnnnnnnnnnnnnnnnnnnnnnnnnnnnnnnnnnnnnnnnnnnnnnnnnnnnnnnnnnnnnnnnnnnnnnnnnnnnnnnnnnnnnnnnnnnnnnnnnnnnnnnnnnnnnnnnnnnnnnnnnnnnnnnnnnnnnnnnnnnnnnnnnnnnnnnnnnnnnnnnnnnnnnnnnnnnnnnnnnnnnnnnnnnnnnnnnnnnnnnnnnnnnnnnnnnnnnnnnnnnnnnnnnnnnnnnnnnnnnnnnnnnnnnnnnnnnnnnnnnnnnnnnnnnnnnnnnnnnnnnnnnnnnnnnnnnnnnnnnnnnnnnnnnnnnnnnnnnnnnnnnnnnnnnnnnnnnnnnnnnnnnnnnnnnnnnnnnnnnnnnnnnnnnnnnnnnnnnnnnnnnnnnnnnnnnnnnnnnnnnnnnnnnnnnnnnnnnnnnnnnnnnnnnnnnnnnnnnnnnnnnnnnnnnnnnnnnnnnnnnnnnnnnnnnnnnnnnnnnnnnnnnnnnnnnnnnnnnnnnnnnnnnnnnnnnnnnnnnnnnnnnnnnnnnnnnnnnnnnnnnnnnnnnnnnnnnnnnnnnnnnnnnnnnnnnnnnnnnnnnnnnnnnnnnnnnnnnnnnnnnnnnnnnnnnnnnnnnnnnnnnnnnnnnnnnnnnnnnnnnnnnnnnnnnnnnnnnnnnnnnnnnnnnnnnnnnnnnnnnnnnnnnnnnnnnnnnnnnnnnnnnnnnnnnnnnnnnnnnnnnnnnnnnnnnnnnnnnnnnnnnnnnnnnnnnnnnnnnnnnnnnnnnnnnnnnnnnnnnnnnnnnnnnnnnnnnnnnnnnnnnnnnnnnnnnnnnnnnnnnnnnnnnnnnnnnnnnnnnnnnnnnnnnnnnnnnnnnnnnnnnnnnnnnnnnnnnnnnnnnnnnnnnnnnnnnnnnnnnnnnnnnnnnnnnnnnnnnnnnnnnnnnnnnnnnnnnnnnnnnnnnnnnnnnnnnnnnnnnnnnnnnnnnnnnnnnnnnnnnnnnnnnnnnnnnnnnnnnnnnnnnnnnnnnnnnnnnnnnnnnnnnnnnnnnnnnnnnnnnnnnnnnnnctgtcaggttctctggcgcaccctctcacctgttcagactaatttcctaagttcggcgggtcccggaccaagatggcgaccgctgctgctgtggcttaggccgcctccccagccgggcgggcacctgtcctccggtccagacggtggctggctgtccccggcccacaaagggtgctgcctcagtgcctctgtgcttccgcctgttccagaagctgtcaggttctctggcgcaccctctcacctgttcagactaatttcctaagttcggcgggtcccggaccaagatcgacagtgttattcttagtggaagaagctacactcataaagttccaccaacatgactgactaaatatgagcttaaccaggacaccaacagtaaatgtgctaatgtggactggggaaagtctaagatgcctcaaccctacacaaagaaatacaggtaactaaggaatactgggagtgggtgaaattgtctttcccagacaaaagagcaaaccaatgttatctaataccaaatggtcattcctgaagatgtccatagaaataacattatatagactgagcaggttggacttatgtacttaggaatattcatctacagaaaaacagaaaaatatgtatgtatacacatttgtgtatgtaccaacaattaatgaaaacagaggccatgaacttgaaaaagatcaaagaaggggtatatgtgagggattagagggagggaagggaggggggaaatgatgtaattttattatactctcaataaaaaaggaaattactctaaaaagcgagaaactagctacagaagatgacattgtacataatttcacttgtaagaaaacatggagattagtagctgactagagagattatatcaagcagagatcaattgttaatgactttagggccaaaattttataaaatcagtagtagtagtggctgcatgactgattctaaatataacagaaatcgttgagttttacacttcaactgctctgcacattccatctcaaaaacggtttcttaaaagtaatgtatgtgtgtacaggtgctatgcttacgacaggccaataaggagttggtaagttcagggagttgagcaggatagtctgggagcaactgcactctcatagctatgtgactctgtgatgtcattagcttcagtttctcagttctgtgtgtatcaggattgtgatagtacatctatggcactgtgtttttatgagttaaatggattaacagtgggatgccttacacttggcacaacagaagcactcagtatttggaaactgaatgtggaatgcatggctacagtgtttgtttcttgggaaattacctttgatttatccagcttgatcctcctgtttcttttctttcttccttccctcctttctttccttccttccctccttcctttcctttcccttccttcttcctttcctttcctttcctttcctttcctttcctttcctttcctttccttttctttttgatttattttatacatatgagcacgccaccattgttctcttcagacacaccagaagagggcaccagaccccattacagatggttgtgcgccaccatgtggttgctgggaattaaactcaggacctctggaagaacagttggtgctcttaaccactgagccatctctcctgtttctacgttgttaaaattcccctttgttaaaaatgtaaaggaattaggtattttcttcatttacatttccaatgctatcccaaaagtccctcattaatcccccccctcccttatccacccactcccacttcttggccctggtgttcccctgtactgaggcatataaagtttgcaagaccaatgggcttctctttccactgatggccgactaggccatcttctgctacatatacagctagagacacgagctccgggggtactggttagttcatattgttgttccacctatagggttgcagatccctttagctccttgggtactttctctagctcctccattggaggcccagcgatccatctaatagctgactgtgagcatccacttctgtgtttgctaggccccgttatagcctcacgagagacagctatatcagggccctttcagcaaaatcttgctagtgtatgcaatggtgtcagcatttggaagctgattatgggatgaatccccgggtatggaagtctctagatggtccatcctttcgtttcagcttcaaactttgtctctgtaactccttccatgggtgttttgttccaaattcttagaaggggcaaagtgtccacactttggtctttgttcttcttaagtttcatgtgttttgcaaattgtatcttatatcttgggtattctaagtttctgggctaatatccacttatcagtgagtacatatcatgtgagttcttttgtgattgggttaccttagtcagaatgatgccctccaggtccatccctaattaaaaaataaaaattaaaaattaaaaaagaaaattatgtgagctttatatttgggatgaccttgactgcaaatgtcatgtacttcctgaatgcagaataaacaaaccatcttcagtctcacctctgttacattttgtttgtttgttttatccatacacttaaattggctattgagaaccttactgcagacactactcctcttatgtatatacattggaagacttttttttttttttttgcaatgtaacaactttctgttgttaactcttttcctttccaaacctttttaccatgtgggttttggattaaatctttcttgaataaatttatgtgaagatataaagatacagagatgtatgtatgcatttgtatgaatttagagcttctatgtgatgtgatcttatctgtgagcatgattgcatttttagatatattaaagcatattggcttcccacatcctttgtttgatcaccctggaattgtttgaggtcctttcgtaagacacagcatcttgttctgccatttggaattattaacaggttgtgtgaactttagcacatgggatatgtggaagagtttgtaaataaatgcatttttttaaatgtaaaggaaatcacagagtgagtggcatttactttggaatgtctttgattaccaaagaaaaagttgacaccctctaacttttcaaaataaagtttgaaatcatactgttctgcgaaacactgccttgctaattgcatatttaaaaagacaggtaaagcagcttacctgtaatctcaggacttaggaggctgaggcaggagatgtgtcattagtttgaagtcagtctgactgtggagaatctaagctacagtgtgagatcttgtctcagttaaaaattaaaaaaaaaaaaaagaaagagagagagagagagagagagagagagagagagggagagagagagagagagagagaaagagagagagagagagagagagagagagagagagagagagagagagaaagaaagaaagaagaaaggtctttgttcaatggcccatggaaattgataaatcaaaggaaagcattgttgagagtttatgaattacttagtagaaattggttctcaactacctcacaaaatatatctactgtaacagatagtaatgaatgtgcactgcaaggaatgacctgtgtggatcacagatgtgtgaactgctggtgtgtgtgtgtttgtgtgtgtgtgtgtgtgtgcaacctcagtctatggttcatctttaataccatgtaatagtagttgcattatttctgagattgtgtgtttctactaactttactctcacaaagttttctcttgaggtttgtatatgagtatgtgcatgagtttgtatatgggtttgtatatggctatgtatatgggattgtgtatgagtcctaatcatttccgtttctgaaacgatgccattggtgtgctgacagaagcatggatttatgtgcacactcccctgaaggtttccagtaagtccttctgctagtggaatggtggcggtttcccttgtatgtatacactgcctgggtttctcatttttttcattaactcttcatatttcttttcggtctcagagaacttttgaaatgatttcctttgatctccctctcccagactttaaagtacctgatgctactctgaaggaaaacttgaaagtacgtgagacccataccgtaggtttccattctccttttggatccacagtctgggcgcaagggtcgttttggtgctgtgaacagttggagctatgcagccagctatgtaagcgcttgaaatgatgttgcctatgggatctgtgtgcaataacctggtgaacttagcctatgagagcttgataagcgctggttacctctttcactggaaacgtgtatggaaggagacagtgtgagaagattctctgggttgtcttatgactgcagctttgaatttttgaaacaatagttacattaatgcttagagaatctcacacagtgctcatattcacctcccaatactcccagatctacctctccactcactttgtaaactgctttttatatttttaggagattatctcactgtagctgtcttggtattctaatttttacaatctttctgcctctcttccctggtgtactctgagcttcaagtgtcatggttgtggtgtacttgtgttaactggggataggtacccctacagctggttgatctctgttgtttgacaaatggtagtttttgtattggtctccagctgttgcaaagggaaacttccctgatgaggaagcctcatttatgtgtggaggtaagagttaatatttaggattcagttaggtgtcatactagtttaaaaaagaggcagtagtaatacattcttctctaggttctctatcctccagcttcaggtatttggctaaatactgtctgggcattaattctctcctatggaatagtccttaagtctaattaattgactattggttgcatctagggcataagtgccactactctacctgtaagaacatcttaccatgctgttcattgctgtggttcattggtgttacagatggggaggaatactggttggttttctctgttggaatcttacacagttccttccaaagctgtgagacctatttttcagtgtgaagcattccatttcagatccaaattgctccctccaattcctgtgtcaggaataaattgtgtcttcagcagtagggtctcaccttcttttctggaaggcagctaagcacaacagcaatagcctatagtgtattgggtctttaggattcccccatccccagtaacaacttaaagggagctttcccaagcctgatactgggggttttgttagatcatccttgttttttgttttgttttggttttagtatttttggtgagtgaggaaaggattgttaccccaattgatataattcaattaaaattatatgtattatatttaatttaatatgcaaaatgtataattctctatgactttcctcccagtgtcatttcttcctcctttctccctctgggttgctgtccctcttccccccacaacctggtaaatcccctcacccatttttcatgttcctttgattttgtttcccagattttgatttttgagcacataagactaaagactcgagatgcagagactaaggactagagatgcatagactgaggactagagatgcagagactgaggactagagatgcagagactgaggactagagatgcagagactgaggactagagatgcagagactgaggactagagatgcagagactaaggactagagatgcagagactaaggactagagatgcagagactgaggactagagatgcatagactaaggactggagatgcatagactaaggactagagatgcagagactaaggactagagatacagagactaaggactagagattcagcattttgcactcaggcaaaacagcggtgcggaaagactgattgcttatcctctcagaagcccagggagcattgaccagagatttaaaggattgaaagttgcaagaaaataagattattccttagctctaaaggtttagaataaccttgctcacacctttgccagaaacagaattattgtcttataagaacagagccaactatgatatcaagagtgctgctcagaatcagctgctattttagagcactttccacagtatttcactgtgtcttagtgcccctgaacttcttgtaacattggcttagacccgctttaattgaaacaacttacatctgtatatcctgtagagtccctttgtatatgaagtgccaaattcaagataaacgtcttgaaaaaaatgttttgttttgttttgttttttacatttctgaattgattgattgaattcctttgttttcttgcataggacagggaatggtatgccaccatctatgtgggaaagttagaggacaatttataggcataattctctcttccaatcatatgggatccagggacagaactcaggttgtcaggtttattgggaaatacatgacccactcagccatttcatcagcagagtagatggaaaatagaatatatatcatatttcatcatatatatgtttgaaacagttgactgtatattttgtttgtgaaatgccagcctagaatgtgactaatagaaataaataatcagagggaatttattaaacagactgacttgaagagagtcccccttccctataagctgtcttcaactctactgtcagagtagctcattttggtatgtaatcacttaaaatacatacaattgtctcaaatattaatatattatctctactgctgcattataatcttgatttcataatagtcttcattctgctaaatgatcttcatagctgatcagatcatacatgctcaaggcagaagggtttgggtttataatggagcaagttcaaggttggttctacttcagaggctgggtatataaagttacctttatctcattagaataatttactatgggcatttgtatgtgcataatttcacagatatttatattagaagtcatagcaatgacaacattgcagttatgaagtagcagcaaaaataattttatagttgggtgtcatcacaacacgagagactgtattaaaaggttggcattaggaaggttgaaaatcactgttcttcaacaaatctctaccttttagcctggtccaggatatacatttgttccataaatgggcagggtaatgagatccatagaaagaaccaagataaacatttactcatggcagaactgagggtctcacatgacagtttttcagagcctaggccaaagcctgtccacttctaatggatgctccatcattttccaaggcatatcccatttcatactggcatgtgatctggagaaactcttcaatgaatataccataaacatattaatagatgttagaatatccgcttatgttatcttagtcatttagccaaatgtttcatctctactacagacctaaagtttcttttctatagccatacagtgttataatttaattagctaaatgatactattagtttattaaatgaaaaatccttttctaatacaatgttatgtcaagtttaaatttaaaccagttctttgtatcatttttgaaagcaagactgtgctatagtatagtggacaaagtgcctctttcagtagatagtaaaggttctagaatgtttaattcttacaggaaaaggatggttctcaaggcatgggataaaaaagtagggtgggtttctacattgcaaacagctttatcttgtctcacttttacccaggtgcagtattcagggacattggtgctttctccttttagaactgtattttagtaattttctgaataccatcattaatttcattcatttaactaatacatttgtttcaatggatatataatgacatcatttttgcccttgtcacaccctatggaagacgttctagaggggaacatagcatagcaggatactggtgatatgaaaaagaaggacagggtgggcatctgtggaggaggagggagtgaaggcagaccgtgctatccttttgcatcattattgcctattatttttcctcttattgaaaaatagaaaaatttctcatagaataaatcctaattatggtttccattccctctacttttcccacttctttcccacctctcctcccatctggacttcctttcatgtttttttttttttaattagaaaacaaacagacttctaaggcactatagtacactgtaatataacacataatataatgagataaaacagaaagtagcttatcagagtcattcaagacaaacaaacaaggaaaatagcccaagagaaggcacaagtaatagatacctactagttcacacatttaagaatcccataaacacactaacccggaagccataacattcatgcagaggacctggtgcagaccagtgcaggcaccaggcatgctgtctcagcctctctgagttcataggagctttgctcatgttgattaggaaggccttgttttcttggtgtccttcatcccttctggttctcaccctctttctgcctcctcttacatagcatgggcttccctgaaatccgaggggaggaatttgatggatacatctcctttagggatgagtgtttcaaggtttttctaccatctgtataatgactggctgtgggtctctgtatttgttaccattagttgaagaaggaacctctcctggtgaaggctgagccaaggtattgatctatgaatataagagactaccattaagagtcattttattgctttatttttgtaaatggttcttggttgcccaagcaatgttgaatatagttttcatctcctggagtgggctcccaggctgaagctgggggtctgggataaagcagtgtgtgggaggagggaagtttggaagggaaaatctgtgtgacccgctggagatgtgttcagagggcaatgaaaaaaaaaaaggattcctcagtaggtagtttaccacagagctggatatgagagtggaaggttggatttggaggagttgaagaagaggcaaatatctgtagtcagcgttcctgtttacctggtcggagttgagtactatcttttcaaaaattccgctacttaaaaatacttggaaactacttttgggctgagtataaagctcgataaatcttttagaacttttatttgacattttagttatttactttacattcatcatagtttgatagattgagcctttgctcatttattgccaactaaaaaatgaaatcaataataagcataaatttaaattgtagtccatcacgcttcccacgatgctcgttgctctggctattctactgcatcctttgaagagctggggcattatgtggtcagcagtactcaagtaattaatgtcagtgtgtgaaatttccccttcagcagaaatggctgcttccaggaggaggctaaactgccattaagatgaaaagttatgtaagtccattttatttttttttgttcaaaatattaggcaaaagtcctgttctttatagtgaaatgttgagtaactgctgtgtttatagctccttgattcagaatcaagtgttggtccttgccacttgatcaaccactttgaaactaaccatctacacactgattccccaagattgttcaaagaaatggattgtacagggatttgcttttgatgatagtaagtgggctggtatcaaggatctgagctttttctgtgttttgacttttgttcaagaatatcagtaagacagcataggtctcttcattggtcttcagcaaatgatggcatctttttaaaactcagaagacgatttatcaattaaggaagatgacacttgtgtgtttctttaactctgaaatgttctgaaaatgtcacctcaagagctaaacacctttctccttatattcagctgtaacataaccattttataaatctctaagaactttacaatcaagcaatttaatagtctattctcagaagaaaacattgtgactggcatagataatattttataagaaaattggatgtcttagcttgtgaagaagatgatttcattttataatttttatttacaaaggcaaataacatgtcatcaatttttaaaacatgatgatggctaaggatttgtattaaaagagggccagagttctgaattaaatgtatctgagtgtcagtatgtttgctatgtgtgcatacatggtgtgagtgtacacatagttctattgctatgtcttaaaatcccaacttgacacccatttgacacattttacatgccaaaaggcaatattgatgttaaaaaaaaaacttagatacatactcaggctgaaatttggctcctatggtaacattgttgggagtagtgggttccatcaatgatgattatgtcaggaagagagagtaacacatttctttccagagtgagtgtgtctggtataggactgatttagttactaagaagacaagcaccatcctattggttaattcaagtctcatagagtaccaggtttagggaaatgttatgtcacagtgtgtgaatactggggcatgttaattggggtcaccaaaggaacagtcttctatgttaacatccctgattaatcctgataacatgaaatacccctccatcccttgtgagaaacacttaagtcttgttcaggtaatcgtgcaccgttgggctctggttagacagattcagttgggtttagttcttgttagtaggatattagatatgattaacttctcttcctcttggcaaactatactaaccatggtgagataagcagatgggatcatttgggggtttggttttgattttgtttgttttgaggtaagttttgaagaaagacatagggtcaaatacaaatgtgtgttttttaattataacatacattataggtggaaaagtataggttgccacaaggggaaagcagatcatgaaaatatttctggaataggagttcaaattaatagtaaatgaataataagaatagaatttaaaaatggttggcaaagtaaaagatgcattctaagtgtccttgagatgggagagaacatggcattgaggactatggtgttcttgaggaaatgagagcagacaactaggtaccctaggcaagagtgacagaagatgagaggcagagctcttggaaccttgatggccttgaagggaaggtgtgggtggggattccatgaagtgaagtgctgagattaagtggatgagatcattaggttggggttgatggtttataaaggtaaagctggtgtggatgtggaaaatcaaggtaagatactaagaaagaacgtggaagagcaactaggagattatcacaagtatctaggtgctgaaatagtagaatagacatggtgaagagcaagctgcctgtggggtattaggcagacaagatagacaatagttgctttagtaggatgaaaggaaggagatatttttcccatatagttttggaggctctaagttcaaggtcaagatgttggtagtattagtttctgtcctttagcttttttaaaaaaaattagaactatgatttctgtttgccatttctatattttgaccggacctctcactattacactttcctgtccacctttctccttcactttggccttcctactcccaactagacacctttctaatttggggtcttttaagataccgtttctgaatatgtctggactcacaagccagcccttaacagactctcaacgctgtttgttactcactgtctctactatttgaacgagaaaaccaagacctagaaatggccagggacttttagcaggggtctaaatcattaagtgctttgatggagtttaatctgagctcatttactcattttaaccttctggatgtttgtgttgatatatctttttgaatctaggaatgtgatttcttagtttttaggtcagcatcactggtcttgaagaacactgtggtatgggccgtagtttattgtccggacttctttatttcctccctctcctctctccatcccccctcctgttatcatgtacacacacagttagcatggtcactgagtgcaattctggccagtggtggtctaagtgctaaataatccatcaataacaaatcataatcccaactttatgggactgtcaatttgggttgtatatgaaagatttccccttaggctttacctcacaccctctgttacatactttacattaaactgaaggggagaaggaaccacatttgctaaacactgttcatatattgagcatgtttatttacattatcttatgtagtaactgatggcatgcaggtgcagaatataattatttatttatttttaaaattatttattcatgtaaatcatatgtttactagcaaaaatattattacatttaaagttttctgttatgattattcagatacatttctctttgttactgaccagggaaactgaagagtcaagtgaccagggtcactgttgtgttaatggatagtgggcatgtgtgcacctttgtattgggtattttcttcctctgcatcaaaaatgggcagtgatttcaaagactgattggagctattgaaacacagatcatcattttaaggttatggccacaagtagcaaaattggaattaaattagcttagcatttgaaacctagatatccatgggcatttgtgcacacatgcaaatgtgtgcacatatatgagtgcatgtgtgtatgcatgcatacatgtatgaagtgataaagatgcccatgtgacaaaggagggcttggcattgagaagtggcagatgccttactgacgcaaatttgggggagatcagaactgagattcaatctgtagctctggaactacactcatggcttaggtagccctcagcctttcccctctgttgcctgccttcgttagcttctagcatctgtgtatgtttgcttattatagatgtagtttcccttggagtatcatggtaggaagacttaagagaaaggaatatacatttcagttgagtaaatgactctaaaatcacaatgcccgacttcgagtagacttgaggcccactgcattgtgctcacagtatttttgtggtagatttcctttagccaggtctgtctgccaggttctccgggggcgccatactttatttacttgagcatctgtgatttgagggctcgctccattgttgctgcagtatttttagctacagtctgtctgtggccgacacattgtttttatggtctacaactggggactggtaacgtttactttagctgtcaccagatatgacatgtatgtaaagaaagtgctattttcaaacaatttaaagacaccagttttttatcattccaacataactcaaataacagttaactataatgtgtacaaccatgactgagtatcataaacagtcagtgttttgccagcaaagctatcatgaccatagcaccttattttgttgtggttcccaagcaaaaattaagccgctcctggtggttcacatgtacagtttggcaggcaggaggctgaggcaggaggatttctgcaaatgtgagaccactgtagtctacatggtgagtccttggctagtatgagctactacatgagttaaggttacaaaatcaaatgaaatgacaaaataaatcaaacatagcagaacaaaggcaaacactgaagagccagcaacgtagcagcagagcgcaaatggcaaagctaggcgactggaacacgatcacaaggtgttttaatctcttggtgcctcagaccttccatttataaaagagaagtgctaggattctcagtatatttgatgtaacaagcatttgcagaggcagtacaagcttatgtgtacattatatagacggcagtgttcaattcctatcagagcccaagaggggcctcttgttagaattctgtagtgaggagatgggctctccccattgctggcccagcaatttagtgtctctaatacccctgatttcttcagcctacagcctttcagagagggaatacacaaatcagctcatggaatgaagaatgtacaagacacaaactccattgataaagctgaggggaaaaaaaaacatttgaaataattataaaagcaattttcttctctagcaatcattttacctgtactttttttgtcctcctttccttcgtgtgtgtgtgtgtgtgtgtgtgtgtccatgacacatgcatgtgatcggcttgggtgcatgttgggtgtcttcttctattgctcctgccttactgtcttcattgagttatggagggtttaggtatacattctattcttcttgccttactgccttgagacagaactggctatttagtgaattccctgaacccacctgtctctgccttctatctctgagattacaagggttacagaatttctttacagaggtcctgggtgtttaaacagaggtcttcctgttcgcagaacatgtgtccttacccacttagccatctcacagtcccactcttagattttctgagatatactagtctctatgtgtcagagaagggcaacttcagtagatcatggaggggggcagtgtgtgtatgagaatatgaatgttccaaagcaccgttataaatgctaagtatatattggttcaccattcactcattcattcattcattcattcattcaagcttcagttctctcagcttgactttgagacagcttcattagatattttagggtcattagagaagcttagacaaaacttgctgggattttttttttcttgcactcagacttgtgcttggcgaacagagtgagcaggtttaactttaaaaacaggctggtaagtcttatagacctcactgcaatctcttagaatagtccctcaggggagagatagacttgtgagagaagtttgatcagtgtgtgtgggagcctgctaggcaggttacaatactgcaagaagagggtcaaagaaggcccatcttcatccatccccaccaagaccataggtatgtgaacaaaactacattggacttccaaatccatccaaccaccagtccaataccaccaagtgattgcaagtcagccagaaaaaaggcagtcagcccagtggttgacaattggactcccaagtgatgctcataccgagccattagtttttgcatgccttgcttggctgagaacaggaaacatgttttcttaagtctacttgatacctagagaagtggttctcaaccttcctaatgctgtgaccgtttagtacagttcatgttacagtttcccccaaccataagactacttttgctggtacttcatggctgtaattttgcatctgttatgagttacaatggaaatatttttggaaatagacgtttgctaagggggtcatgacccacaggttaagagcttccctcttattcttcagtgttagacattagcttagacaaatggaggctgaaaatgcgattcagtattatcttaatccatgttcttagggctatacagtgtagtttttacccagagagaagacagaggaaagccgattcttgatttcactaggaaagtttctatatgacagaagattgtgaggcttatctggaaaataggttgagatgatgaagttgctattttgcaactaagaaagcataagtattagatataataacaaaaagtgaagcattctatttatttaattttggtgtgagttcactgcttatcaaatgaatacctgtcatgttaaatttgtgaaatacagccagtaatccaactagactatgctcattaccttattagcccatctcttctagatacatttattatttcccactagatatagattcatttgttctgatcataacccatgtgtctgtttgagcatgcaaggaatctaggaattaaacatcaaattatatcactactgtgaggccttgcatctgtcttgttgatttgacccaaactagattcccatgggttggggggaatctcagttaaggaagcagactccatcagagtagcctgtggtcatgtctgtgggcatgttcatggttaatgattgatggtgaggtcttcacccactactacttcaacttttgcttccaagttcctacattgacttcctgccctcaggaagacagtccttctggggatggactgtcatctggatatgtaaggagaaataaaacccttttcaagttgcttttggagactgtttatcacagcaacagtaaaagcaaggtaggataggccaggacagaggtacagtagaaaaactgtcagcaaagttctgtgaaagatgcctctaaaagctggaaatcctgtgacatccgtttgcatccatatgcatacttcagaatctcatccggttcttcctcagttaccagtcatctcttcaactcctaatatgcctgtttcatcataatgctgagtgtcattgataggtctgtcaccacagttcattgtgatggaacccagggcctaggcatgcctttgtaagctaggtcatcaaaggctctcttcaagtaagagacttcatgacttacattataatgtttctagtttaactcagaatgcttcgttgttgcctccatgtactgctaggaagaaacaccctttttatttccatcaaattgagtgcagtgccatatgctaccaacaagaaaaccccccgtaaacaagaaagggaggagttggtatatctccattcagaaaatgaaaagaaaagtttcatgtaattgaagatatgtaatgtgtgctgtaggactgttgaagacctgcaatctttcatgtcaaagccctacacaattcatttgtcatattctgtgtgtgactgttttgcctacacatgactgtgcacgcgaacatgctgtgtctgcaaaggccagaagagggcattagttctctctgagactggagttccagttggcagtgagccaccatgtgagttatgggaattaaactcagcaggttctatggaaagagcagccaggactcttaactgctgagccatctcctcagctcctgccccagacgcacatttcttaagtaatgactcaggataatggggtgtgaattatccagcttgctctcccctggccaggataattctcaagtacaggctgtactagtatttttcaaggaaaccgaggtgcaaacttatctacaacgtcaagggcaaggtgagcttgagccagaatgtacatcttcatgctgctttcttacaagagagatgattctccatgagaagtggcagctgaaataaacaccacactgtgacatggctgtaagctccgtggtctatcagggactagtagcacagagaccacagcggtttgcaaaccacaccttggagaaaaataacttacagtgtctgtagacacttcctcggtggcaaggaggagactcccactgtgggcatgcctcgaccctgaatcttttcctggacaacattccttttactttctgccccgagtttccccgggagctgatggttatactcaccttcacagggggcttttgtcttagtgtctgcttctagagaagccaataaggcaggcaatgaggtgtattggaggacaaaccgtgtattgtttgaagagtcttttagccaccataaagatccatttggaaaatgtgaatgagagcaggcaggaaatgagattgaagacggtcacaacctgctcccagccaggcagcataggacttgggctcatccattacttaggtatctatttgtttctctgttttatttcttttaagtctgtatatattgtaaaagtcaggaggttcatcacctcatttccatatatgcaaatgcactttgctcatagtcttcctctttccccagttctgatttctactgtcctaggagttcctcttcagtttcaagcctttctattcccctctggcttctgcagagaaggaaaagtgtactacctgctctatgaagttgcttttttccaattcatgttgtgggtcctactcccattttttaaaaaaatgtcctcccccatcctcctttaagcttctgcttttgtttagacctccattattttggcggggtgggtaggacaatctggtctgcaacctggtcaggaccaggccaacccttcagtggatgtgcagttgaaatggaaggttcgttgcagtttataaattaaaactgcctctgtgaagttccttgaaggattaaagctcacagattgattctgaattacatcataaagatacataggtgtatcctaagtattgtactaacaaagagtgaataaagcctttgagtatacagttttctccctctatgaatgaggaagctgagcgaggcgactccaaggtccgttcccatgctcccactcaatgttcaacaatagtcatcagattacatcaacgaaagaccacagaacagaatatgccagtggcaaatgtcactgttcaaaacaaattgacaaaaacaaaaacaaacaaacaaaaaaacattctttttttttttgaatgaccaattctttgggaagctaactcttgcctgtcttttataatgatatgtttactttgcttctctgttgctttggaaatggggaactatctaattgggttgacaaggttagcatgccagagccttggagagagactggatggaatttgtgactatatattctcctagacatgctttttgccatgcgtattgtactttaatcattagctaaaaaaacaataagcctgctgtgtgctattacattaatgctctgtcatgtgtgccgttttctaaggtaatttgaaaataagagaaaatataattatttgaggatgctttgggaagaggtggatgtatttctacaattaaataataatgcaataacacagcactcagaccctagtgtagctctcagagaggacatgtaaggctgagagaggctttattttctcttagttttaaaggaacctgtaaatccgcagttgtgattttattgatcaagaaaggcgatttaccagtgtgttaaatcttctgcttattacttcatctcctctggtccccagacaacccttaaataagtgttttgtagactctctgttgtatgacttgcctaggcagaaatccagactttgtggtggcattcctcagacactccacttaactagaacaaactccattccctttagttttctggttttgagtttggaaagatgattttctaaataataagatatgataaaaatgaatatgaaccttaagtgtacaacttggtgaatttttacccatgtgcaaatttgtgcaactaccacctagatcattttggttttaagatgacgttttaaaatagtcttattttactgtctctccctagtccagttatatccatctggaggtaaccttgtctctgacttctaccacagcttgattttgcctcttctttcaccttatggaaatggaattgtgcactgtatatagcttattggattgaaccatatgttactagttttgtgaaggattttctattcttgcatgtgtacacacacacacacacacacacacatatataagcatagattataatataaattatatatggtatatgattattgtataatatatgatatatagttcatatataatatgtaatgcattatctataatatagtataccatgtacaatatatatatgactatgattaaaatattccattgaatggatgtgtcattctgtttgtcatgtgtatttgatcaattttcatttctctgttactatgaactgctgtagttctcaatactcacatttagtcataatgtttttagtcactgtagctagaactgtgattgttggctcatattttagcttcaataattgctggggaagggtttcaaagtggtagtgttaactttcattcccacaagccatgaatgagggccctggtgtttcagcatttgttctgatatatgatattttagttgacatgatgagttgtgttagcatctcattatagtttttatttctgattctttgaagaacagtgatgctaaatatggaaacttattttatgaagtatgattcaatgtgttttgctatttattgcctttgtacattctgatatatatgtgggaaatatatcaaatttataactatattctaattgtctgttgcttgggtttcttttattattgatttctctttttcttttgtgatattgaagatttagccaaagtgcacacacaccaggcaagcatgcttccagtgagtctagtcacacccttcccatagcacctaatgactgatctatttccttccttccttccttccttccttccttccttccttccttccttccttccttctttcctttgtgcaatattgaagtaattttttcattttattaacagatgttactacttttactaaatataactttttgtgtttctctctgtaagcaggtaggaaacagagaaataaactaaaagtaaatcttccctctgaaatttttatgcccttaacagactacagtggagttttaggttagttacaggaggcgaaatacttcatacagctgtaaggaaggagaaagactctaggtgcttttcacttggctagctccttaaaacctactttctcctaggctccttgttaatggaaatacatagcggtgcttacctgagaaatacattggaccccatgaatgccttcttcatgtgctctctttttttccaattattaagcatgtgaattatgaaatgtatttaatccttgaagacttcttgatctcccagaatccaatttattggttagaaattgcttgttccaatgacaggagcctattatctcaagaaagatttcagcaagaaaggtagattctagaatcagaggaagaaccataaccccttgtgtttatgtgtttatgtcacctgagtatgacagcaccgttgtgtatatgtgacctgagggttcaatcatgctcagatctactttcctctctgtgtcgttcccatctgcattgaccacaagtggatttacgaggcaagaaaacaactaaagctggcaaacatcaagactattattgctattcagtacctctctcaagcatcctgaagggaaagagagtcttttgtccctttcaatttagtatttaataatcctactgatggatttgggggctgtcttgagtcatctgtcaacctatgtgaacaaaagggagagaaaaaccactatcattaagcccagggtgaaatgaagaaaagagtacccctgtcacccccgatagaaatagtaggtatggtaggtattgccggggaaaggtaaacataaacgcctggcagacagaaataatacatgttcactccagaggagaggacataaaaggggtaacttactgtgctacctgtggaaaattagtcagagaatgagttcaaagtatgtggaagagggtggaagctccatgattatttgttgaatttgagttacttcttgcctcctgctcttgaaattggagccctgaagaggattatggaaggtgtaagggttgcaaaaataaagtttcgaccattggtgaattctcaaggtcaaaaatcactatatatagaaaccaaacgctgcaatggttctctctgactggatcgagggatgcagccctgatgctgagggaggggatcccaagtctcctacactgtcatccctaaaatggttgaagtcaaggttcaggaatgctgagaaaactcaatcatcggtgcttctcatttttaaagattttttccaatgagagaatagaatgctttatgactattacagcagcattgaaaggattgataagcatgactaataaactatgtgggagctttggaatcattgccctggcagtgataactctgtagcaataagcatttttcttttaaggaaccagttttcacttcagtccttagttcttgttgtgctgactagttttttttttcctgtctctttttttttccattttttatcaggtatttagctcatttacatttccaatgctataccaaaagtccccataccccacccccactctcctacccacccactccccctttttggccctggtattcccctgtactggggcatataaagtttgcaagtccaatgggcctctctttccagtgatggccgattaggccatcttttgatacatatgcagctagagtcaagagcttcggggtactggttagctcataatgttgttccacctatagggttgcagatccctttagctccttgggtgctttctctagttcctccattgggggccctgtggtccattcaatagctgactgtgagcatccacttctgtgtttgctaggccctggcatagtctcacaagagacagctatatctgggtcctttcagcaaacgcttgctagtgtatgcaatggtgtcagcgtttggaagctgatcatgtgctgactagttttatgtcaacttgatagaagccagagtcatcagaggagggagccgcaagtgagaaaatgtcttcaaaagatacggctgtcggaaagcctgtagggcattttcataattagtgattgatgggagagagcccagctcattgggggtggtgctttccctggactcatggtcatgggttctataagaaactcttgaacaagccgtaaggagcaaggcaacaagcagtactcctctgtggcccccacattagctcctgtctccaggttcctgccctgcttgaatttctgttttgactttctttgacaataaagtgtgatgtggaagtgtaaactgaataaaccctttcctccccaagctgctttcggttatagtgcttcatcacagcaatagtaaccctaactaactaactaactaagacactactaacacaatatttaccttgtcatcttcttgagaaacctctttctcctaggcatggcattaaatgtgatagttatctatattatactgaaaatatatattattgttgtattattaaatgtatggttgtgaaatctacttaatccattaaagatctttgttcactcgaaatgtgtctattaattaaaacacagctagttgcaagtcacagaaacctaagccatcccctttaaaaaagagaaatatggaatatgagtagatcagatctgataaatttttgtgtctcttaggcttcaggcttggaagatagtcaaggaacacctcactaggcccaggctcccactggctatcataccatggagaaaggttggaggttcttcttggtattctagcaaattcttaatgatgctacgttgagctgtacattaatgttgctgctttgagctgtaagaagagcacattgaaagaactaaataacagaaatatcccttaaaacttgggaataaaattatttggggggggcatcgtattttaaccgattagcaatatttacgactgaaacacacttatttccctttcaaatagaatctccaatgcaaaagcaattctaagggctcctcagttcacttttgtaattaaaatttgttgagaggtatgttgaagggtagatctatatattgaatcgatttctttgaagccatacaacttgtagaaagaaagtataaaattttttcccatttacttgccttttctgttcttgcgcattgcaagtaatcttaacctttgctccaaggctccccatatggtcagcctaatgggattttctgttttccccgtttgttttcctttgttttgtgtgttcttattgtgcacatatcaggaatcagatgccccttaacagcacttccaaccgcgatgaaaaaggctaatgttgaatgctgccatctctagccccagtcaccagatgagtcagacgctctgcaaagggctgaatcataggacttcccttccttcagtcacgaccaaagcattgcggttgccctaccctgaaattaaaatctaggggcaagaatggtttcatttgtaaaaatgtcaggtcaatattgacatataataaatcatgctgagagtagcaggtcctacagtgacagctgcatcaagaaatgactttgtgtgctcacacatcttggagtgagcattagttcctatgctgaagtctttgggggcttacatgccttcttttaaatcagatctcctttagaatggcccctgtgcctcttgagtctttctccctccctccacctgccctctgtattagcattactgttgggtaatcttttttccatgaagctaggaaaagcacttccactggaaaccaggtctacatattatttgcttacagttggtagccctccaaacagcagacccttttactgagtagtagtcacctctttgcttatagctggttgccctgcaaataacagactctttaagtgagtagtagcccctttgcttacagttggtaggtagccttcagaaaagaacagaggctttgactgttttagcagctccacttataaacctcagcaaagaaactgattgatcgctcctgggtcatgtgcccttcactgtgctaactggtggcaggttgttcagacagtgctctaattcaccaagcctgtgctatactctctcctcagctggtagcaggcagtatatttagccgtatcaaaaacatggaaaggatttttaatgctgcttatagtgaggctatataaaaggtaaggaaaaaaattgggacatggggaaaagagaaacctttgatgctggaaacctaggaagagggcaagatccttggggcagtgaatactgaggcttcttgccagcaggtaaggaaaaattcccccataatcaacagctgcctaaggcctcttgcccttcccagaaataaacccggaattgcttaggagtttcacgtgaaaccccatttacaggaaaaggcattgtattaagcccagtgtacaatcctagtggcttctttgactttatcagattataattctgtccaaggcatttgcagagttaccaacatggtacatacagctagggctaagataagtaattgtgactcttctttaagatgtccagatccacacagataggcaactctatcagagattgctcacttgttcttgggggtatcttcatccagaatgaccccctttcttttttcccccctccttaactctgacgctaagcctacatgaaaatatttttaataaaatctccagcatactctgtttcgtacgctagtaatcttgaaattctttcctgtctctaagtcatggttcagccccagcgaaggtctgtaacagccttcagaggcttcccaaggctgagtggcagcgtagagctgtgtttgtgcgacctcgccactgacagcaggcagttaggaattctgctgcccagataagatggaaaggatgccagtcagcctaatttgctgtagtctcaaacacttacacttcagggtgattacatactgtgaaggtattccttgaaagaaaaatattgaagtatatctatgtatatctatatgtataatatatatgcatatatatatatatatataaatttataacagctaaatgtggcttaaagctgtatgtttatatcttctatctacaagtaatccttggggaatgtatagattagctatcctttctagcattctgaagtctccaaaaacaccaacaggatgatgttttaaagtcagttgatcccagagttaagtctgtgagctgagcacagtggacttttaatagtagctccctgaggtaaaggcaggataattaagagttctaggtgagtaggggcaatttagacagaggtctctcagagaaaagactgtgtacaattgcaggttctattaattaaagaactgcccattaaaaagcttcgggactgaagtgtgtggagtgtgggtaaatattgtaccatccaggtgggtgttagcatctccaaggaggtcatctaaaagttaaattaaaatggctgcataagtgggtttgtggaggagggacacatctataaaacaaatctattattttaatgtttcttctggttgttgttgctgatgctgtttttaattgttgagacatgttctcacgtagcccaatgtggcttcaagctgtctgtttaaataaggttgacctgaactctgaaccattttacccccatcccctaggtgctgggattacaggtaccaccacgtctggcttctttcagtgtttcttttgccaagtttaatctctattttccaatgcatactatatatgtaatgtgcagacatccaatctgaaagcatttcatatataattacttttcatgggttctaaagaagtcattttttcccctttggaggactgtagatacctatgctgtgcagtgcacgctctgtctccggctccttttttggttctatttgtttggtcccttatatacaacgtggttgttgattgacacacatcttctcttccccgtcccaccccctcggtcagggtcatcacacactgtttccgtcatagggaagagaaacggcattttggagccgctacagagtagctaccaatcggggacaaaaccacaacccaagagcacaacatttggggcttgtatggatagagagggacacccttttacagatgagctggagtagacttggggatgaagaaagaatcaggaaggatcgtcagactttgctgctcctgcagggtcttggtatgttccccagtcccatatccctgcccagcacaggccatttgttgtggtctggtctccctaacatgatgaacacttgtccattataacagcgatgaattgatgcagaacggcaccaatgcaagtgctcttggtttgtgaggaggcggtcctgcctccctgacatttcagtcccgctgccatgttcttaaatgtttggaaaaaaaaaaaaaaacatgacaaatataatgcaaaacgaataccctgctttgcaaaatcagcggtttgtaagaatatatcttaaaatagtcaatttgaattttgttcaggcagcgagttacctgccaccctctgtgactctagtcccaggagaatcggatgtccttatgtcctcttctagtcactacaggcaccgcacatggcacacagacacacattcagacaaacactcatacacataaaacaaaacaatctgaaagacttttttttttcccaaaggaatgcacaaatattatgttgaaaaactagaaaaccagtttccctaatgcgatcttttttttttctctgtttcaccaatcaaatggtttgttaagcatttttctatatagtgtctcaaattttaaattttgtttttataattttgtaaaaaatcttttggttttttttttacacgaggagaagtttttctaaaaagttatcttctttaagatagacccataaatttgagggctcatataactgtttcttccttcttattttctctgccaaccctggacagcatcttaaaatctcacacaacagttttaaaggaaatagtcacaagtgcaattttactgagattgttgtggttttttttttttttgagttaacataagactgagaatccttgtgatgtcgttaaggaaagtggcagaatcatttctctgcagatttacagagcactatgacatctgtgaatgccaagctattatgtaccagcacggcttgtgcttgcagttcacatccagggggaatctttgagccactctgagtttccccttgcgttcagcatgtttttacctcatagctgcagaagaagcaaagtaattacttacaaataactaatttacttgcttagcaaggcttctgatcacgttatggtggcttttattaaatttcccactaacataattattgtggggaatttagccacataaagcaaacacttcatttggcccgagataattaaaaaaaaaaaaaaaagaggaaagaaacccacgagtactttacacctgccttcacaatctctatcctccaaccccaatgctccagttcacccaccagagttagttgtaagaacagttgcccaggggctggtgagatggctcagtgggtaggagcacccaactgctcttccgaaggtccagagttcaaatcccagcaaccacatggtggctcacaaccatccgtaacaagatctgactccctcttctggtgtgtctgaagacagctacagtgtacttacatataataataaataaaaaatcttaaaaaaaaaaagaatagttgcccaaaacatatctcagcaaaaggatgctatgtccaaacaatggaaagaaaccccccacacagggcgacactgggaatcttgccgtgagataatggtgacatttcaccatcctatgacattctcagttcttcttcggtatggtttagtgccatgcaatagtaggcaatttgctgggttgaatggttgacaatttttcgctcttctgtctttatttctattacttttattttagataaatgccagaactaccaacaggaagtttttcccaaaagccccatcactcctcagaaggaaaaagatgatagaaccctcaataatatgacatgcttgtctctgaaaactgggaagctacctgtccttaggaacttcctgattaggcagttcaagtataagaagtaggtgtgcccagtagtaggagcaatgtgtgcagccgtatcaccaccaccaaggaaaatacaatccttgggcaaacaggctttcctacaggatgcccttggcagtactctctggctctaaccagaggcatccaacccagatttctcttccagataaccattaaaaaataagtctctggccagctcatgcattaagtcaagtgtatgggaaggtgaagagcccagaaatacatttttagttgatgaacaccgaccgaggagccgcctttttctttatatttccaagctcatgattagaaagaggcttggttcttgcgaggtgggcttcccacagatgccatctggcttctctggcactccttacccttgctggcaacacactcatgtgggaagtaccctggacggggtagtggctttcaaaggctagcagcatctcatgagcctgtagactgcactttgatcattagtgacggttcgtgctagaattctctatcttggtttagtgagagaagagatataaggctagtgctagaggatgttatgtaaattttggaaggggtttaacattcagttgtaatttggtgctcatttctaacccttccatagtatatgtgctcttgaaaggccagtttctgctccacagacagggtgtaaacccagtttacaacagctgtgtgtgacagcttaattttaatagttaactagattggattaaacaacaccaaagagattaattaagtgtacctttgtgtgtctgtgtgtgtgtctgtgagtgtgtgtgtgtgtgtgtgtgtgtgtgtgcgcgtgcgcaaggatgtttatagaggggattagactgatggagagaagaccatttccaaatgtggggagcaccatgccatagccaggggccaaaaatgaataaaaaagggaagtatgagaaagtcatcaggattcatttcttgttcctgtctgtaggcacgacgtgactgttgctttctagttaggagtcatgatgccctcaaactcaaactgttgtccaacataaagacttccttcttcaagttatggcttgtgagtcttttctctacaacactgaaaaaagaactagcgtcaaaaatgggtcctgagaagtggggtctgcttgtgattaattgatcacatgtttcccaagctttggcattagtttgtgagagggatacggaaaagtagggagttggaatgcagacgagcgatgaagtcctacacaaaatcttaatggagcatttgggtaagcatgactataaagatcttcaagacaagaaaaatgcaaccagtgaaggactagctcataaggtttcagagcaaaacaaggaatgtactgaaatggactagatagcatttatgttaaattctggttaggaatcccctggattctgtgtgtgtcccagaaatgtgagtgaggctgaactcaaaagttatggactaatttttttggcagttgaattttttttttgtatgtgtctttttttttcccattttttattaagtatttagctcatttacatttccaatgctatccaaaaagtccccccatacccacccacccccactcccctacccacccactccccctttttggnnnnnnnnnnnnnnnnnnnnattctaaggaggggcatagtgtccacacttcagtcttcattcttcttgagtttcatgtgtttagcaaattgtaccttatatcttgggaatcctaggtttggggctaatatccacttatcagtgagtacatattgtgtgagttcctttgtgaatgtgttacctcactcagaatgatgccctctaggtccatccatttggctaggaatttcataaattcattctttttaatagctgagtagtactccattgtgtaaatgtaccacattttctgtatccattcctctgttgaggggcatctgggttctttccagcttctggctattataaataaggctgctatgaacatagtggagcatatgtccttcttaccagttggggcatcttctggataaatgcccaggagaggtattgctggatcctccggtagtactatgtccaattttctgaggaaccgccagactgatttccagagtggttgtacaagcctgcaatcccaccaacaatggaggagtgttcctctttctccacatccacgccagcatctgctgtcacctgaatttttgatcttagccattctgactggtgtgaggtggaatctcagggttgttttgatttgcatttccctgatgattaaggatgttgaacattttttcaggtgcttggcagttgaatttttaatacggctaaatttttcactgtgttatagttattattcactacatttacccagttttacactgccccatatttgtcacatgtttttcttaacctaagtctagttgcagcagaaggtctctaagacctcttcagtttagacttgaggttccagtttggtatattcaagtacttgcaaagctacttatgctcaggtggtattgttgaaaaattgtagagcattgagcttgctcactggggaaggaactgatgtttattgagtgtgtgctgtatgtcaatctctttctatacacatctaccataactataaaaaagtgtgataagcatatatatcaagagaacatctgttcttattttgtactaaaagtctgcaggcctctgtccaaggttttacaaatgatgacagggatccacgtttttttcagttacactgagaaataaaggaagactttggtaagaccccctttattcgtcctccgctgctaggtattgtaaggatgttctcctctttcgtttttcttttcaatataatattttttgtggttctctgggaattttgcatcatgtacctgatcacacttacttcccattcattccatgtttgccctccccacacttgtgacttcctcttaacccaaaaagtaaaaaataaattaataaatacgtaaaagtacaatttgtgttatttatatacccactggagtatggtcaaactcttagtggccaaccccctaaatagaactaagtggttcccctcctggacccctgtggaagccaccaattgtagagagctaacttcagcatccttaacacacattttaagagctctctttgatatcttcctatttagactactactttaacggtgattaagggttcacagaagccttccatctcccctttttcttaactatactcttgcagtcaccagtatcaatgcaaaagcagcttccttgttctttacagtcagcagaaggggagcacggtttctggggacagcacagatcacaaacatggcttctggttacagtaggaccatggacccagagaagacactcagaggtagtcaggatgctatagacatcaccatggactcaagtggtagcacaggctactcatgtcaatatggcctccagcatcagcaccacccatggacatctataagaattcaagcttcagcacagaccacagatatcttaagaggaaagactatgtccccattttttctctctattcccacccttcacacatttgtgtaagtccagtgtatgtgtgcacatgcatatgcatgcttgtgctcatgcatacattacgtgtgtgtgtgtgtgtgtgtgtgtttgcatgcaggcaacagagattgttgatattacatgtcttcccctattacttgccaccttcctttttgagacagggtttcttacttgacctagagctttccattctggctagattgcctggccagagaacatctggggtctgcctgtcttcatctccctagcactgacgtggacatacacttccacgcccagcttatatatggacagtggggctctgagcttggagctttcacggcaaccaagtttcttcctgagccgaatccccaggggtactttttattgcctcccaaaatactgtgtagattcatggcttttacaacctcgcttgtttatatttttttgattacttgtgaacttttgagctgtgccacagtttcttacttctaattatagacagtgatgcaattatttctagcatcagtgttactctctgattaagactgtgtttaagaaatttgtgttaccatcttttcttataatagtttgttatataggtattgtatccttcagagatgctatcaataaacaaaagcaaacaagcaaacaaacaaacaaacaaacaaaagaagctttgtctaatcatcccaattttttttagcttttatcatgacattgtttttagatcagagaataaaatattatttcataatatgatattacaattacaattaatttataatataataggttataatacatatccagtattaaaatctgccaatcgagtatcattgttacacatctgtgtactttttgttccagaaaaatctgtggaagaattttgcctgattttttttaagagccaaaattttattcaaatttatagcagataaagtgacaggattcaagattaagacactgttttgtatagaacacagatgtgccatgaataaaccattttatagtccctccttttagtgaggggtatctatgataccccactaagaatttataatattcattaggctatttcttttaagcacattggatacaattaaattttttctgtaattttgtcctcttaaaaatttcttctctcatatattggatcccaactgcagtttcccctccagactcctccccaatccactcattttctgtttccatacataaaatggcaggctaccccatggaggtcaactcaacaaggatgttaagttgcagtagtactaggcatctaccttcatattaaggttggacaaggcaacccagtaggaggaaaaaggtccccaaagctggcaaaagagtcagagacagcccctgttcccactgttaggagtcacatgagaaggccaaactatacaatcacaacatgtctgcagagggctaggttgaccccacatatactctatacttgttggttcagtctctgttagcccctgtgaacccttattaattgattctgtaggttcgcttgtagttttcctgacccctggctcctacagtctttcttctcccacttctgcaggattgcccaagcttagcctgtttggctgtgggtctcctcaatgtttctgaatgaagcctctctgataatcattatgccaggctcctgcctatgaaaatagcagaaaatcatgagaaaactttcatagactttttccttttttttttttaaactggttttgtttggttctactctctgtatttcctctagatgggctccctctcttggtgtgggtctcaagctagacaagtcattggttggccacttccacaatttacctgagtgcaacttgaaggaaagacaaattcaggactggtcaaaaggctttgtggctaggttttatgtcccaatcatcccactggaagtcttgtccggttacaggagatgggcagtgtaggctctgtatccctgagatagaggagatcagcctggttacaggagatgggcagttcaggctctatatccctgattttcaccaactcctgggttgagagtcttagctaggccaccctcgtagattcctgggaggttctattgcactaggtttctagctcaaaccccatgatgctccccaacagttctctctccctccatcctcccctcacctgaccccttctctttcttttcctaccctttcgaagtccatcttcaatacctactccattttcccttcccattaagagtcatgcttttcacacccttgagaccccttgttacttagtctctgtgggtctgtgggttatagcgtggttatccatcgttgctttacagttattatccacatatagtaagcatactccatatttgtctttctgggtctgggttacctcaatcaggatgattttctttctagctcttctcatttgcctgtagatttcatgatgtttaacagctgagtaatactctattgtgtaaatgtacctcattttctttatctattcttcagttgagggacataaagattgtttccagtttctggctgttatagataaagctgccatgagtatagttaagcaagtgtccgtatgataggatggggcattctttgggcatatgctcaggagtggtatagctgggtcttgaggtaaatggatttccatttttggggggaattgccatactgatttccaagtggccgtaaaagtttgcactctcaccagtaaatgaggaggatgtctttgctccgtgtcttctccagcatgagctgtcatgtgcatctgtgatcttagccattctgacaggtactctcttctaggattctctttcctccattgttcccccaacctggcccttcctgctgtgtacaatggaatcttggagttgttttgatttgcatttccctgatggcaaaatatgttgaacatttatttaagtactccttggccctttgagatttcctctgatggaaattccctgttgagttctgtaccccatttttaattggatttttggtgtgatgatgtttagtttcttgagctctttatatattttggaaattagccctttgtcagatgtggatttggtgaaaatcttttcccgttctgtaggctacctctttgtctgatagatggtgtcctttgccttacagaaagaagcctttcagtttcataaagtcccatgtattaattgatgctcttagtatctgtgttatttgcactattggcacttagtattgtgttattccggaagttgcttcctgtgccaatgtgttcccgaatttctcttctatcagcttcaatgtatatggttttatgttgaggtctttgattcacttggacttgagttttatgcagggtgataagtatggatctatttgtattcttctacatgccaacatctagttagaccagctccatttgttgaagatgctttctttttgttctgttgtatatttctggcatctttatcaaaactcaggtgtccagaggtgtgtggatttacatctgtattttcaagtcaattaccttgataaatatgtctgttttctactaataccatgtggtttttattactataactctgtagtagagcttgaaatcagggatggtgttaccttcataagtttttttttttttttttttttttttttttttttttttgttttagctactctgggtttttttttgttttttgttttttgttttttttttgttttttttttttttgtttgtttgtttttccgtatgaagttgagaattgttctctcaaggtcagtataataattgtattgaaattttgatggaaattacattgaatctgtagattgctttagataagattgctatttttactgtgttcatcttacccatctataagcatgggagatctttccatcttctgatatcttcttcaatgtctttcttcagggacttgaaattcttgtcatacagatctttcatttacatggttagagttacctcaaaatgctttatattagttgtggctattgtgaagagtgttgttttcatgatttctttttcagcctgtttatcatttgtatttaggtgggttactgagtgttttgagttaatcttgtatccagccactttgctgaaagtgtttatcagctgtgggggttccttggtagaatttttggtgtaacttatatatactatcatgtcatctgcaaaaaatacttcaacgtcttccttgagttgtcttattgctctagctagaacttcaagttctatattgaatagttatggagagactggacaaccttgacttgttcctcgtgttagtagaatcgcttagtttctctccatttattttgacatttcaccccttttaaaaaactgaaatttgaatgcaagcaaccaccttgtgaattgttcacataaaatatttttaaatgttttacttagagatatatgtcctgtatgtataaagcattgatttttagtggtggtggatagatggctcactgggtcctgtggttgccacattagggtgagggtgtgagttcagatcctcagtgtccatataaaagtctgggtggagcagtacacaactgtaatcccagtgttggagggaaggaaatttgtagatccccttatctcactggctagcctggttaactgaattaatgagctccaggctcactaagggattctgtctcaaaaggtaaggtggaaagatcgaagacgatacctgatgtcagcttctgacctctacatccctgtaggcaccatggacccatgcaagtgtttatcctcagaaagaaaaaggagaaggtgaatagatattcagagatttcagatcaggcacaggaaactcaggtgtataatatcatcaaataactcattgttcaattttttttttctagaacaattgagaagcttgagttctctgaagtctcagaattttttttttttcttctgcttagtgctgtgctaggaaacagtttccataagggagactcctgcagcatttaaggtaatctggaaggatttttactttggagtcagttaagcacttattagcataagattaaagatggcaaaaactagaactgatctgcaggtgatttcaaatctcgtgttatactgcaaatcttcttttttttcccccccactaagaagaatctgttcaagtgctagttttggcaggaaaaaaaaaaaaagcaaagcaagctgagagggttgggatgcagaggtcagcatttgccttaagaaatagctggatgtgatttcctttatactgaatgatgccaagattggacctgtttcaatggcacgaattgaatattgtgtggtttgtctagcttttaaattgaagggcatttatgattgctactatggactgcctttccatggagggttctgggatgcctgatgactggagggagtcacattctctgcctttggaaactttccttttatcatctcagggaatggccacatcgcctccatagataaaaaggcaggccaggatggacccatttcaaatattacaatgccagaatatgaaaggagaatcttctccaagggggaagcaggtgttgatactagagacaaaggggcatgttgccagcttgaaagcatagcagaatgtactgaggagtgagaagtggtaggttgcccagcagagcaagctgtcactgtggaaggtcctgcaaggcttgggagtggcaccccacaggctggcagggcaaaggcaaacagtgcatctgacagttgcttgcatgttaggtacaaagcatgcatctggcttctgaagacctggcctggtggccaccgcagcctccaagatgatcagctctgcaatggttggagctctgaggatgcagctaatagtggggggataggatgaattccagggttaagtccagaatacaaagtgactaatacccatctacccctacaatatttaacgatgcttactatatatcaaggaatgcgcaggatctctcacgcagctccacgacttctgttcttatagtctacaacgctgaagctatcactttctttacttattgtgggaaactgagtcatgattagattaagagtctgagcagtgagttcagtctaggcattctgtctcaaaagcctgtggttaaccaccatgctaactcacccacaatcataaaaggcaacaaaatcagcagcctattggaaaaggtgtggtatctcatctctctttgagatattaaggactatcatctaatttaccctagggttagctctgccttttgtagaggcaagcactgcttgcatcctacacttagaaggactaaataatagacattatctactagcgccatgtctggcaatgatgttggtcctcctctcactcttcctttcattaagaaatccctgtctaggggataggattgttccctggaaaagagcttggtcaagcttgagaataatgctacagaccatggagggaggtcctaacccacctggaggcttcatagcacttacccatgaccaagcaggttgttctagtctttagatttattgggggaaaagggctggtcaagagtatttatatattataaattcagtcaatgacatctgacatgttagagatataaacaaatgttccttcaagagcaataagcgaccaactcaagaagtatgttttgataaacatgttaatcatgtgttgctttaaaattattttccttccattaaatttgctagcatgcaggagaactaaccaatgagtttaaacttttaatttctataattatgcttaaatcttggattctactacacagcatctgctagtagtctgaagaattctgtccccagacaagtcatgtctagtctgcagtgtctttcataccagaaacatcaacccaaccacagctaagaaattccacaatcatttttttgaccaaattcataattttctttttattgatgtgttacagaatactaattttaacagccttaccgagggataattgctgtataaatattatgtgtttgctgtattccatttgatgagttttgacatatgccagtcaactatttgatttttttttagctacaaactacattcaaagctgtagctatacatacttgaaaattttaagtacaaaaaatttttatgactcaagtagtatgtggtcactttagaaaacttttgtcctagcagtcatagaagtaacgacaaagaacccacccataacttcagagctaaatatagttaaatcacagttcacattcattctataatcttcagggctttttcgtttgtttgtttgtttgtttgtttgtttttatgacactggggatcatcctcgaagccttgaacagactcccccggggcaccctaccatagagccacatctccagctccatggtgttttgaaacatatcttactctacaacccaggctactttggatctctctatggagcccacactggcctcagatttgtggtccttttgtctcagtctctggagcacctagaatacagatattcactgccatacccagattgttgtctgtgtattctgcagaaatgggctcttgactttaaacctactgtcttcactcagcctttctattatgaacatcttaattctatgcatttttatccttctttgtaacagtctcttcctattctatggcatcttactgcaatattaacttggtagtcctccaccttctggtattgtgttggttcactacatgtttttccttttatgggacctgtgtcccttgtcatttgtcatctctgcctccatctgtgtgttctcctgccatgctgattcaaagggtcagcatgtttatcacgcttctgatatgcctgccaaagacctgtccagaaatattgtcccaattatactcccactggcagaaaacgagcaccctaacattgggtgttatcattttaatatgtgacccgacagacaaaagaaagcagcctttgatttaatttttatctatttgcttactagtgatactgaaattttcatacatttgacattttaattttgtacctttttcttaattttcctgtgcataaccttcccccacctctcagtttcttgggacattttcatttttctaaccgaattttaagagtttttcatgctgtaattgtgtaagatgttagagtgcttttgccaattggtaaaaacatcctcaacggtttctttttaagctttagaaaatttatgtggccaagcagtgatggtgcatgtctttaatcccagaactcgggagagaggcagaagcaggtagatctctgagtttgaggccagcctggtctacagagtgaattccaggacagctagggctacatggagagaacctatctcataaggccaaataacggtggtagtagtactactagtagtaatagtatgtgaattatgtttatatgtataggtattgttcttgcatgtagtatgtataccatgttttttttcctgttactaacagaatagaaaagagcactgaagtcctggaactggagtgacagatagttgtgagctatcatgtaagtgttagaaactaaacccaggtccccaggcaagagcaacatgtgcatcaaatgcttttaaccaatgagtcacctttccagccccgaactctcacaatttttgatagagttttcatgcaaaattcatgatgttcttgtttttaatagctgaatagtattccatcatataaatgagccacatttttctgtatctattctttggttctagtttctgactatgacaaataaggctgctatgaacacagtggagcatgtatccttatggtatggtggagcatcttttgggtatatgcacagtagccttatagctgggtcttcaggtagaactatttccaattttctgaggaatcacaagattactttccagggtggttatatcggtttgcaataccatcagcaacagaggagtgttcctctttctctatatccttaccagcatgtgattgaggttttgatcttagacatggtgagttgtataaagtagaatctcagggtcattttgatttgcatttccctatgactaaagatgctgaacatttctttaagtgtttctcagtcatttaagtttcctatgttgagaattctcttcctgtctaaaaaaaaaaaaaaaaaaaaaaaaaagactaggaaaaaaatgaagcaaagactaaagaaatggctgtgcactgaatggcccaacttgggatccagtctatgggcagacaccaaacctgaccctattagcaattttatgttgtgcttgcagacaggagcttatcatgactgtccttggaaaggctctaccagcagctgagacagatgcagatacttagagccaaccattgggctgaagtcatggatcctatggaagagttaggggaaggactaaaggagctgaaggggatagcaaccccataggaagaacaacagtgttaactaacctggacctctaggagctcctagggactaagccaccaaccaaagagcatacacaaaatcaggctggtcagcagcacatatgtagcagaggactcccttgtctgtcctcagtgggagaggatgaaactaatcctatagagacttgatttcccaaagaaggggtatgcccagtgtgtgtgggtcttctcagaggctaagggaagaaggaatggggtgaagaactctgagaggggggctaggaaggaggcaacatttgggatgtaaataaataaaattattaatttaaaagagtatctgtgttattttcttaaagtacttccatggcttcatttacaaacttttacaaaaaacatttacaaaagttttgaagacagaggaaattttatttgaaatgatgttagggagacaattttgagattttgttttgttttgattatgattgtcaaattgggcaaatacaatgattgattaacctgtgatgaatatactgataaattattattcctactaaatagaaaattctctctctctctctctctctctctctctctctctctctctctctctctcacacacacacacacacacatctatttttctgatatattcaatttcattttcttttatctgaatgccaagatcagttattttcttacagcacttccctcctgcattatcttggtcttctggaaatcatacaagtgtgctggcatgtttgtttatacagtgtctttataaataggtgagtaaggaaaggtaataccggaagtccagttgtgagagtaaatagtgcatgggtgataaattattgtaattattgtaggatgtggtgaggaacaaacaggttcatcttcctgttccctctgcctttgtgtgtgtttgcaaatgcttataaatacatagttaatttctatctgcaccctgcttgccttccactttagaaacagattcttttttgtttttattttgctacaaagtttgctttgattccattaagcacatgaataatggtctctaatgtcctagggactgtggaagtccaactgaaggtctttttagaaattacagtctggtgacctcagcctcgttttgcctaagctcattcccagcacacgtgggactctggtccatcttgcaggtggcccttcttccatgtcacgatcaaagccttgaagcctgtttagattggtgctcccgtggtttgaaaagttcactgcccttctgcttccgaatggtctcttcatcagcagagtgtttgtcctgcgtctgttttcctcagcttggcttcattcaagctagcaattttcaacttgcttagcttctcagttttagtttatctgcttgaaaggaaccgtgatgctgtagaaaaactgaactatcacactgagctgcagtacaccaaaggggacaaaggaaaataactgatctgttgatgcagcagtacaagggacaataggagcttccacaaggttgttttagtaaaattgcaggtctactaacctagacctttgagtatgtgtgtgtgtgtgtgtgtgtgtgtgtgtgtgtgtgtgtatgtgtgtgtgtgtgtatgagtgttggcatgtgtgaatgtgtgtgtatttgaatgtatatgtgtgactgttcaagtgtgtgtacatatggataaagcgtgttggtattgcatctcaaattgtgtttaggaaaacattgctttgtaaccaataaccatccttttctaaatttaagacttaaatgtttttagcatttcttatttgagtactgtatttttaacatttctgcccttgaaactcctccagcacagccttacatctatgaccccttcttcagttattgttacatgtatatagacatatgcatatatttcacacaaatactgcctgctgagctcattttcttaacatatttttactttgtttttcaactttaacattgctgtttttcatctagttatgtcccaacaatagactttgtcctcatttccagtatgcatggttgccatttattgactttgcagctggaccatcaaaagcattattaactgaaggtggtggtgatttgggcatctctgctgccctggcctctggtggaaatatgcaatgatttgctaataaggaagataccagctatatgaggaatcctaataaaggattttatatatataaataaatatatatatatatatatgattataatatacaagattattatatattaccttagattaaatcagggctcagtattgagatctcccccacatcatttaatgagatactctctttattatgagagtatgcatgtttttcttttcatttagagtatagatttccctaatattaaattcctttcacattctggattttgtgaactcttttacaaaaacttcccaaagggcaacttttccatgttttctccaagattgtgtttgtcatgttatataaagctggatttgatagacaggagagtgaaatagacttaaatttctaccttgcattggaagcttggcatagtctactgacccttgtctgatagaacaacatccactcagtataactaagatacagggggaagagtgttgtatttcttataagcagtctcctggctttggagacacgatttccaccaatagtggagaaagaagctcccaaccaacatttctcccaggaatcattcattacaagatgatctttctgggggttattctgtcaatttaaattctagctgtatatcagagatactttcctccttttcaacaagtttctggtttctgtgcctccgttccttctgaaaattaggtatttaaaatggtatcatttatttttacagaattatgtgggaatagaattggtaccctttaagtgattggagcatgagctggcacacagtgaatgcttttcatcaaaatgacaaaatcactgttttgtcgctttgggaatgaagtagactcatccagtgccatttgacaactaaatgctcttggaatgattgggtcgctgcctcttccacctgtgcttttagtgttctcaaagctggtcttatttctctgtcctagtcatttgtcataggagagggaggggtcagcattgccttagagagctcagctgcctttgccataggactggctgctgaatcttgctagggttatcatgtgttttactgtgaccagtgcagtgtctttcatgtgcatcacaccatcctcatggtgacagaatctgaaatgagctgggaacctcaagaacctttttcctccaatcttctgtctttctgcaacttaaattccagtgttaaatttgatttcatttggcaacttatgtttttgcttttttcaagacagggtttctctttgtagccctggctgttctggaactcactctgtagaccaggctggcctcgaactcagaaatccgcctgcctctgcctcccaagtgctgggattaaagtcgtgtgccaccactacctggccatgtttttagcttagagtttctttggtgaattaaggagatttaaaaaaacaaaaaacaaaaaacaaaaaaaaagttcagctttccatttgccattgctcttttgaaatattgaactaataagctactgggtgatttaaaaggcactatgttctattttcattaagaaaataatctattagcaaaataatctctggggagatttttgtcttttttttttttttttttttgacatgcaatttcatagccattccccatttccatcatgaacaaagaaggaacaaaggctaactgcaggtaccaaataggcactacaagcattgcactgattcagtacagcctccagttaggggcatccaagctctgaacagcaatggggtgattgcagcagtcctactgtatctgagtgaaattccttccaggtctggccttttgtctgcgctcagagccttttaactcttcagagaaactcggtgcttgcttggtgctggctgttgccagttaggtgaaattccttccaggtctggccttttgtctgcactttgagccttttaagtcttcttgcttggtggtggctgttgccagttaggaatgggaagtacaattagcttcttgctggaaagaaaaaaagtgataggactcattttgaggctattcacccagtccctaaagaaagaagaatcagagtggaaaatgatttttaaccttcagacttgaaattcatctgaccccattgatagctgtgcaaaagctcgggcctgaacccagaagctaaagagttgttctgaaaaaggctatcaacttgagggagtgtgtgggggatgggggtggaaaggaaacacaagagcatctacagggatgaaagggggagggggaagtaataaaattctgttttaattaaaaagtattttcattaaaggagatcttgctttgttttggggagtgtcaagaactagaatgacgcctcttactttgtggcaatagaaaagcagaataataatcctaggaggagcacattttattgacaagttttgctgtcttaataatgtctctgtgtgggactagacaagggtgcccactttctccctaccttttcaacatagtacttgaagtattagccagagcaattcgacaacaaaaggagatcaaggggatacaaattggaaaagaggaagtcaaaatatcactttttgcagatgatatgatagtatatataagtgaccctaaaaattctaccagagaactcctaaacctgataaacagcttctgtgaagtagctggatataaaataaactcaaacaagtcaatggcctttctctatacaaagaataaacaggctgagaaagaaattagggaaacaacacccttctcaatagtcacaaataatataaaatatcttggcgtgactctaactaaggaagtgaaagatctgtatgataaaaacttcaaatctctgaagaaagaaattaaagaagatctcagaagatggaaagatctcccatgctcatggattggcaggatcaacattgtaaaaatggctatcttgccaaaagcaatctacagattcaaagcaatccccatcaaaattccaactcaattcttcaacgaattggaaggagcaatttgcaaatttgtctggaataacaaaaaacctaggatagcaaaaagtcttctcaaggataaaagaacttctggtggaatcaccatgccagacctaaagctttactacagagcaattgtgataaaaactgcatggtactggtatagagacagacaagtagaccaatggaatagaattgaagacccagaaatgaacccacacacctatggtcacttgatcttcgacaagggagctaaaaccatccagtggaagaaagacagcatttttaacaattggtgctggcacaactggttgttatcgtgtagaagaatgcgaatcgatccatacttatctccttgtactaaggtcaaatctaagtggatcaaggaactttacataaaaccagagacactgaaacttatagaggagaaagtggggaaaagccttgaagatatgggcacaggggaaaaattcctgaacagaacagcaatggcttgtgctgtaagatcgagaattgacaaatgggacctaatgaaactccaaagtttctgcaaggcaaaagacaccgtcaataagacaaaaagaccaccaacagattgggaaaggatctttacctatcctaaatcaataggggactaatatccaacatatataaagaactcaagaaggtggacttcagaaaatcaaataaccccattaaaaaatggggctcagaactgaacaaagaattctcacctgaggaataccgaatggcagagaagcacctgaaaaaatgttcaacatccttaatcatcagggaaatgcaaatcaaaacaaccctgagattccacctcacaccagtcagaatggctaagatcaaaaattcaggtgacagcagatgctggcgtggatgtggagaaagaggaacactcctccattgttggtgggattgcaggcttgtacaaccactctggaaatcagtctggcggttcctcagaaaactggacatagtactactggaggatccagcaatacctctcctgggcatatatccagaagatgccccaactggtaagaaggacacatgctccactatgttcatagcagccttatttataatagccagaagctggaaagaacccagatgcccctcaacccaggaatggatacagaaaatgtggtacatctacacaatggagtactactcagctattaaaaagaatgaatttatgaaattcctaggcaaatggatggacctggagggcatcatcctgagtgaggtaacacattcacaaaggaactcacacaatatgtactcactgataagtggatattagccccaaacctaggatacccaagatataagatacaatttgctaaacacatgaaactcaagaagaatgaagactgaagtgtggacactatgcccctccttagaattgggaacaaaacacccatggaaggagttacaaagacaaagtttggagctgagatgaaaggatggaccatgtagagactgccatatccagggatccaccccataatcagcatccaaacgctgacaccattgcatatactagcaagattttatcgaaaggacccagatgtagctgtctcttgtgagactatgccagggcctagcaaacacagaagtggatgctcacagtcagctaatggatggatcacagggctcccaatggaggagctagagaaagtacccaaggagctaaagggatctgcaaccctataggtggaacaacattatgaactaaccagtaccccggagctcttgactctagctgcatatgtatcaaaagatggcctagttcggccatcactggaaagagaggcccatgggacacgcaaactttatatgccccaatacaggggaacgccagggccaaaaagggggagtgggtgggtaggggagtggggatgggtgggtatgggggacttttggtatagcattggaaatgtaaatgagctaaatacctaataaaaatggaaaaaataaaattaaaaaaaataatgtctctgtgtgtagactattcagtgttgcttatccagactgagagattacctacattttaaggtttctcatctttggtaccaatagactgtataagctctgggaccttctgtttctaaatttgaaggattgatgtgagtcatggtccgtgttgttagagcccatggttcctgttgattgttagagcccattgaagctcttggcattaatgatttctcaaaggattgacgcagggtaagcttgaggcttaagcatcatggtgtttgagcatagtggtactgctgagctcagtaaggggtgacacaggagcccagcatctaagtgaaacacatcatcagccttgaagtagagattcaacattcacactgaggtttaaccttgaagttgactcaggaaggttaacctctgatcatgacccagaatcagcaagtgacccaaacagaccttgaatccagctgtaaccagttctcaaagtcataacgtcccacaaatcgatttctttttttgcccttttctaccttttctccaagtcaatagctctcatctaaatgagtcctttcttcagaatccgttcatgagaatgaaaggttcaagaagagggtgttcatgggaaggaattgacttgacttgttctaccgcatgtaccctgaatgtaagagggaaaagtgtattgaaagtcgctagagtcaggaggggatagggggtttttagaggggagaccaggaaagggggtagcatttgaaatgtaaataaagaaaatatctaataaaaaagaaattaaaaaaaagaaagtcactagaggagtaatatatttctccttttatagagctcagttttgctgctttttgtctttaatgacaagcttggtgagatagtcaacctttcgaaaagaaaaggaaatccaaagcccttgttaaatgttttctgggggagtggttttatgtttaatatttctaaatcagcttttctccaactgattaaaattcgcctcttggttccagctaacactaacagccttcatagtttccaatctgtctagaagctaatgatacttccaccatgggctcattttcttgtaaccatgctaatggggttgttgtttcctgagaggcagagaattgatatgtttgggttgctgcttctagtctttggtttcctggttgtgtgggtttttttttctccttgtttatgcttcttttaattaacaataaatttcttcatctttctaatgccctgcttttctgttgtttgtggagtcttcgggcaatgacttcttcggttaagaaagatgagagcttgagggtgcttgtggagtcagccagggctcagatgaggttctcctgctgaaccctccttaggtcaacttttatgtcccaaataagaactgcatggtgctctgttaactcatttcacctcttgtattctcaactccaactctggtatgtttttttctcattgtttctcagataatctaaaccagctgtatgtattatcagtattaaaggcagccccatcagccttttccttaagggaagtgctcacaatgcaagtgttccaggaacctaacagtttgaatccattggagccagagaagcagaagcaacagaagaacttggagtctgctaattacaagatggactttgtaaaacgcctggttaggaagtcccggagtgatcagtttgctcctgtatcatctctgccatgcgagtctgggatctaggacaggagctcctgttatctctctctctctctccctctctccctctctctctctctctctctctctctctctctctctctctctcctttatttaccaatctgtccatctacctagaaaacaaaatctatcatctaaagattctcttggatcaggtgcagagacagcatggcccatgtcccccatctgaactgttttcataaataaaagtgccagccgtgattataaagcagggatcaccgagctcagggtgagtgactatacgtcacaatgacattgtggagcttctcaaattcaaaaggtctcagatggacaggattctttaatcagatctgagacagaaaaagtactgcaaaacacaatacctctatgaaacaaacttttgtgatagacattaagctgagtgagccagaaatattatggggaacatcttgatagcttcttgtttttcctctcagggatttttaattgaaaaaaaaaactctctgtgtatctgttataacatagctggtaatgacataatgacatatcctttcttccatactgggcttcaagtgagcagactctataccatactgcctatgattcttaggtcagaactactctgagcatcttcttctgcctaggatggaaaggcactgtaaggaggcagtggcatggagtatgtctagaagagctgttgaaaagcaagcttttgttgttacggtactgggtagcaagaaaatatgaggcagagtaatatgaaacagcagaccataccttgtgagagaagaactagattgtccccagccttgtgtttagggtaaaaaaaaaaaagtgtattttagcgcagttatttcaggtgtgtgctggggagaccataaaccatggaaccccgagaagggagaagggaatggagttgatttactgctaaataactcagcaggaccttttctttgaaacagtggtcaaggtcagtattgaaaagagtgaagctttgacctttccatacccttgggaataaggaattaggctaccttgggagccaaatgatgtacttttcttttctgaaatgtcaattattttctaacaaatctctcctgaaatcaaaagcttacattctcttgagaaagtgtgactgtttgccattgtcctttgagtggctatttacagcacatttttctggctgtggagttctggagccagctctactgtaggaacagaagtctcaccagatgcccaaaggagagagaaggaactgtctgtcttcacttttctcttctgtcccttgtgctcggggtacatcagtatatggaacagcacttgaatcacttagcataaagtgttcacaagagcagaatgacaggaaaggcgttgcagccattaggtggatgagtcacttgcagcctcctgggggtcccataccggcttctctgaactgtcagagaacttaatgtattatgctcttttctgtcgcttctacccccggatcctcaagcagggtttgtcacatttatccttgtgtcccaggacactggtacagttcattgtataccaaaagtgcctaatgaatgtcaactgaatgaatttgtaggaaggattactgttatcgttcagggagaagacagggaaatgggatagcggctttgtatgagcataaactacaaagcaaaagattcattcttttaattcctaagacaaaatgtgcatctttgccattactccagtgaagggaagcagctcgattaagcagaattcagcaaagacttgttgtgtatattttatctactgattgtctatgtaagtgtgaaatgacttgtttccaaggggaaactaaaattcaggataagagtggcagcgacaaacagggaaatgggctctttcaatataaattggtaaatgtgttgtcaagagcattcaggaagcaggatggaaggacagaagggtggcagggactggatggcagtaaactgctatatagagagaaccatgaaccttctaagaaaagatgacacctgaattgagtcttgaggacggtgtcaaagaaaaaaaaaggagatgtacagatatggagatgaagaagagtagaatattccagaaggaaatggaggtgtaaaaaattacagaatgtgaagtaactttaaatggggtcagtgatatggctcatggagttaaaacactcactcactgctgagtcagacagtctgagttcagtccctgagatctgaatagtgaaagatgagaaccaatgtctacaaattgttatcacaaacacacacacacacacacacatacacacacagagagagagagagagagagagagagagagagagagagagagagagagagagagaaagagagagagagagagagagagatcaatgtaatttaaaaataagccactactgcaggtatcttgctatttcaagtgactgagatccatgctattaagagggcaaggagaggctctgcaaccaaaaaccacgtccctactcatcatgtggaggtgactgacttgtacattatgatatgggtgtaaggttttaaagataaacttggaagagacagtgttatccccaagaaggctggttagaaagtggctgatacagtgtggataaatgtctagaacatagtggcgatagatttttaaagagaggagagagctgagagccatttcctagttgtactccagtgagatgtgatcattggttgagtggtggtaataacaggaaaggagtgagaagagctcagagttttggctggtgtgtcagagcattctcagctgagagggaaagatggggacacagaggaggagtaggggagggatggaaggagaaaagggggagggggaggggagagggaaggagggagagagcacaaatagcaggagggatgtgtttgagaattaagcaaaactgttaaattcataaatggacgtactgcctttgagaggattgtggacagttcaagtcagctgcctgacagaattcaggtgcctgaattcgaagctcagatgtaatcaggatatgatatgcattcatggaaatggttaagcatatggcaacatgtgtattttgcctgcatgtatgtctgtgtaacatgtatgtgcagtgcctgtggagggcagaagagatgttggatactcctggactggagttacatttgatcgcgagctgtattatgaactctggaaactaaatccaggacctctgaaagactagcaactgatctctactgctgagccatatctacagcccccatgattgtgaattctatagctttccttggtaaactttgacttcgcagtcacttattcagaattcctgaaaaagtaaaactaatgttattgtttatactgtacgtgaacaaaggagaagatgatcctgtgatgggggaaggatgaaagggagcaacaggagtaggaagatgacaaggtgtaataggggtgaatatgacatgtatatgtatgttttgtgacatatattttttttcaatatactctaaccacactctccccctttcttcactcctcccagcagtccccaaaaccttcactatcccccatatctacccctcctctgtttctcttcaaaaaaaaaaatgaaggtttcccaatgacacccattaatcacagcttaagaagatacaattggactaggtacaagcccacatatttaggctgaatggggcaacccagtaggagaaaaagggtcccatgagcaggcagaagagtcagagacagcctgcgactcccactgttagggggtcccacaaaaatctcaagttaaacaaccacagcatgtgtacagagggcctagaacatacccatgcaggctctatgattgctgcttcactctctgtgagccccagtgagctctgcttagttgaagactataggctgtgttttcctggtgacctagatccttctgcctcctacaataattgttcctccctctcttccatggggttccttgaactcaaaagggaggtaccccatagagatctccaacttgagctagcttgttctctctttctttctctctctctctcctctctgtctctctctgtctctgtctccctgcttctccctctctctctgtatctgtccctgtctctctctctgtgcctctgtatctctctgtctctctttgcctaatgattggctatggatccctgcatctgctcccatcagctgctggaggatgcctctctgatactgattgagctaagcatagatctggatttctgtcagccggtgtagtctctctgcaggaaagccattttatgctaatcaatgtatgctaataaaacttttaaaaaggaagaagtcaagcaagcagccagagagccagagaagtgatatcacagaagacagaagacagaggagaacgtttctagagaaacaaccatgctgcactgtctattcagaatgtccatagtttctgggagttctaaggtcttcagggaaagtacagaaagagggaaactagtatgcattgggttaaggggaagagtctggggtgggaaaggagaatggaaatgctcaatcttttccaagtacttaattgtgaagagaaagaggaccgggctgtggagagggagcattagataaaaggatgaggttagtggattgagtggagagatagttagtggaaagacggttagtggagagactgcttaggacctgggtagaaaaattctgcagatttacagcatgtagatcagggaagacaggattaggtagctttctgaatatttcttactttccatctcacaatgcatttttctcccaatgtatagtaataggaaaatactttgtaaattgaactcctatgggtcccataaaacctgatcccactgatggctaatatagtgtgctgtttgcattcacctctgtcttcaaggtaccatgtgttggacatgttcctcagaaactagctcggagtaaccactgttaactggttttctaagtgtactgttaaggggattctttgggtagatggtgatatcaccagatttgaaagtagaaatcgtcttttggttgatacccaccagaggacagagagaacagcatctgtgaggggaggcttaattttcaccatctcttttgaactaagccattcccagccctaaaagacgaattctagcacttcatgcaaaacagcaaacctgggaattctagagcaaacgaagacacaaacaagcagtctaacagcctccctcacagtcatcgtataagcaaacgtcagcactatcattatagtctgaagtagcaagtggtggttagtgacttggttttatatttgctccagtgcttcaaagggccatgtgagaagtgcccaggataaccatagacagaagcagaactcaccactaaaggaagaaggggcggttagtggctgttatacacacacaaacatttcccatctacctaacttttaagtgccttttcccaagtgttgataatttgagaaagcaaagaaattcagaagccagaatggaatggaccataatacggtgcctatgcaaacgtatgatttttgctatatctcattccaactcctcgtctgtgcatagtttcaggataatattgtagaagcaactttaatgatgaattttcttcttgtccatttccttgctttctcctttactcccttccttctctgtctctgtgtctgtttttctgtgtctgtgtctatatctgtgtctgtgtctctgtgtgtatctgtgtatgtgtgtgtgtgtgtatgtgtgtgtatgtgtatgtgtgtgtgtgtatctgtgtatgtgtgtgtgtatgtgtgtgtatgtgtgtgtgtgtctgtgtgtgtgtatgtgtgtgtgtgtatgtgtgtgtgtgtgtgtgtatgtgtgtgtgtatgtgtgtgtgtatgtgtgtgtgtgtatgtgcgtgcgtgtgtgtgtgtgtgtgtgtgtgtgcattcgcatatagggaatgaattcaagtgccttacaggggctagacaagcagtctatcgctgagccttacctatagccacaacctctcccaattaagtttagttaacattgcaacacacacagtttctcatgtaattaaattaatgtgcatctattttatgcattaggaggggttgcatattttaattagctagtctcctataattggatatctaaattatttcacattttcattattactattagaacttccaagattgcttctgcatacgaatcccttctcacaattaaatttacttccagaattattgtgtaaaagtatgtcaccacattaaagcttttggattttattaatatattccttccaaaggctttatttcatttggaaaccatgtcagcaagatgtgaaacatatttaattatatatatatcttttaataacatacatatccatccaggattttatgaaaaataactttgctaactcacagagaaagcaaatataaatttagagattttaatttctttgataatgagataatgaagtttctgtagctataattttatttctaattttataaaatatatacttactggttgaaatgctcctttttaaaaatgggtttatagcagtggttctcaaccttcctaatgctgtgaccctttaatacagtccctcctgttctggtggcccccaaccatgaagttattttcattgctacttcctaactgaaaatttgtactttatgaatttgtaatgtaaatgtctgttttctgatagtcttaggtgacgcatgtgaaagactctttcaaccccaaagggttcttgactcataagaggagaaacaccggatcatagctttattttcccccctctgtttctttacattgttgataagtgagcaacagtatgtctccactgtggagaaggtggaacagctatggtgaaaggctcccatccttaacgaactcggattgattaatcacacaatgtgtagttggaatagggtgccttattcagttctaaattgaggaaacaatgattaaacttagaatccttagggaacaaagtggagatctgtgcaacttgtctttggctttttgcagtccacagtaggggcctttgagatttggagacttggggaaattgatagatgggtggggcttttgcaggacgataaagaacaaaatgttcaggtgaacaatttaaaaacatgaatgtgagggtctgagttagaaacaaacatggaaagattagagaagtctaactatatcgaagcaatgatgttgggggtgggaatgataagacaaattaaacacgtgttgaacagaccatctgacctctctacttggcctctgagatgtctctgcagaagtccctacaaagtgcaaactgaaaccagatgtcacaagtttgttttccgttgcctgtcagcttcctgtccactttagaactgagtaaactcttctgaaaaaccatgagacattgttagagccatgaaagtagcttccaggaaaaaagtgaacagggcagaatattcggctccaagacacttttatgggcatgtcaggggatggggcactttatactccttcctgacctgtcttaggcaaccctgtgatcttaggctgatccctcatgttcgcagttcctgaatgatttgctgtgtgtcttgagctctctagatttctgtttctagagcccaagcaagagctcagctgagagatatcagcccatggcacctgggcaaacgagagaagctgtaaaattcagaaaccctctagtgctctctttgggtctggactaaaatgcatctggactgtctattaacacagaggttttagaagataccaggatatccaggtagtatcttcccttgtctaaacagaggccaaatggacaaatactatatctatcatctgtatggagaaggaaaactcgtgtacatttaactcactgaggccatcagttaaacttttcatgaaaattttgtcttgtccccttgttaacatttggagtatttatttcttaggctgattgtctttccctaatttatcttcataaagttttctggctaagcctaaataaatcgagtctgtttaaactacatgaggacattgccttttataacaactatagtctatatccactattttcccgttatattagaatctattcaagaggactaggccacagctgggtgagagtatagttgctgagcgtgtgtgtaacagcgtgggattgattacatccttgtttctcccagccctttgagagaatgctagggaagacagaagcaatttaatgtcagtttaatgtaccattagaaatatctaccatctaatgaaaaaaaaaaaaggactctaaattagagacagattcaattgattacttcttaactatccacagtatccattaggacacttctttctccctaaaacactggttctcagcctccttatgctgtgatcttttaagtcagttcttcatgttgcagagactcccccaccatataattattgtaatgtaaacacctgtgctctccaatgctctcagatgacccctgggaaagggtccttcaacccctcaaaggagctgtgacccacaggttgagtactactgccctaaatgaagaaggctttgtgttatatgacggatttatttcagtgagtggcaagttggaactcagtggtgttttattttaatgtctgtgaagtggttttatgattcaaccagtcactatattactctagaaaaggaaaagaaaaaaaaataaaaaaggtcctgttccacaaaaggagaagaaaaggaaattcatcttaagtgcctgacacaaacccagtagctttcctgatatttgagggcagctggaacctacgttttctgtttaaatgtgcagaattatgtttggaggaaactcttcagaaatgtttggatattagctaattaatccctacaacaaccctttggggtaggttgggacaaaactattttctctactttacaacgaagcacacatcaagcaaagggtaaaagagatggcacctttcccaatatcttacagcttcatgtgtcaatgtaatggtagatattaaaattatttttctaatgagcactttagagtgttcgacacttagcctttaatctcctgaaaagactcatcttgatccttgctccaaagctgcacagtttatccaggtggtttaggctcctgctctcagtgtctatcttagcttttctaatctgcttctcgttgacttgtatttctgaagtctattccctgcaggggtggactcttccttctttcccattgacttttatatgaaagcttctgtcataatgacaacatatgtgccagtgaggccttctggttttcatttgtgtatcttgcctagagggagaaacacattgtcttgtcttgtctttgctaagggaggaatttgtagagactcagataactgcatccctgggagaaagaaagaaattatatatatatatatatatatatatatatatatatatatatatatatgtatatatatttttttcaaacattctttggtgtgtgcatagatctgatatttgtgctgattactctctgttaataattaaatggcattggtccatgatagcaacaccagagtggtatggggatataaaaaaatacaaactatggccacagggtgatcaagtttgagtctggacaatgaattctctctggaaaagatacccttaattttgagtagtacaatacattagcaatatctactcttttttggcattattgagataaatggtagatatttttcctggaacaaatgaggcagcaggaaaatataatcctcttgctagaatgcataacatagttgtgtggcaggtcttctattttgcctgcagctctttcctctttccctttctgtctgctttcagagctttctgtccctgaatgctgacagatgaaaagtgtatctgcatcttccgttgccctcttgctcagttgcacttggctagtagggagtcttggcaggtgatcagagtgggtggcatgaggtcatgtgcttctcttcacctctttcctctgagctgtgccagaaagtaacctgcctcgtcaagaaagccagctctgcatggttgtctttttgtagatgccggcagccatctctgcttgctccttgtagataactctgccattgcctgctcccaggactgcactgtcattgtgggttcctctaccccgcccccatcttccttagagtctttatttactgaactctcttaaaatgatcctgatagccatgcgccatctcctgagatccaggtaaatgattcaccaatacttagttgaaatttgcctaggcgtgttttatttgttggggtttagacactgtaggcaacaagtaagactcagttgtgtaattattacttgacatggtggtactcagagaaagatgcagatggtgaagacaaaagtgtgccccatcttacaggccaaatgctttgttagatattactctaagcacatctcttcatcaacactcaaagaagaccaggtattccttagtgtctctctgctaagacatgtcagattgtctagagctatacagagatacacctatttggctcccaggtccatacttttttatggaggccacgctgccccatagctataaagttggagactctggtcattccattaagtctatctgtttactcatattcctttaagttttgaattcctgaagggaagaatctgttaatgatgggattaaaggcgttcaagtcaaatgccttaaactacttgattaattcagtaagactttccaggtcaaatccattgtttgtctgactttactgatttgttggtttgaaaccattgatcaactagctcactgtgagcacttcttcgtggtaccctaagggtactcattacattccagatgaataattaaatattttcaatgagtttctccccagcagagcatcagcttcctacagcagttatctagatgtcatttttttctctctctaggcatggacatttagatcatagttaaaaactatctcaatccatttcgcaaatgagatgaataatatatttccacatttttggaggtcatctaagatgctgtgcatcatatctaatcataaaggtgactcagttcctggaagcttaagtatttttcctgtgtaggttagtccctctattcaaaacctcttctctttaaagcagtgaccacaaaagcccataaagcctaaatgaactaattatttttcccctagaaactcacattggataatgtgtttttcttttacctttatgcagacattttcttcaagctagaaaatctttatttttttctccttggtagcactgggtctccacatctaaggatattcttagcaataatagtatccattctctcttttctatttgtaccttgctgtcggaggggccttggcctccctaaaatatctcactttgatttttaaaactcgaaagagagtggctcatatgggactgaaaccagttttttttcagccttgagagattgccactgtgggctgttagagagcatggtgacggtccctatccaatggtgggattgggctctggactcctctgctgcatggctatccctttgctgaggtccgcagctatattggattctcaatagtctctcatgctttgaactcatgtttggatattttttggtttggttttttttgtttgtttgtttgtttgtttgtttgttttggtttggtttggttttttttaagcagataactattttagattacttttctttttttaattaattaatttatatcccaaatactgccatcctgccccccctagaggaatttcctctatcccctctcccctttacctctgatagggctgccccctctccactatcctcccttcttggggcatcaagtttcggtaggattaggcacatcctctcccactgagtccagacaaggcagtcctctgctacatatgtgctggggtcttcacaccagcccatgtatgctccttggttggtggttcagtttctgggagctcccagaggtccactgttggtcttcctgtgatgttgccatttataaataataacagcttgcacctttcaaaattgttttgcaaaccaaattctttcagcccatgactactgctactccttttcctaaatgtcagacaggcaccttatttcccctaaagaacttagactacatccaaatgatggctcaaacacactgttgcctcttaccctccacacctacaatgtcagcctacactgtttattagtcaatgttttggccaagctttttggcctcatcttctttgctctagagtaagtctcccaaaagcatatcatcctacatacaactctgccctatgagtagtgaagctatgtctggaagtaaatggatagcagaaatttatttaattctcccttccttctaaatggtctcctttccagtgtctaggaaagtggaggttaggaaacactgatgatatgaaagcgacagttactctggaagagtctttggaataacagttattgtttaacgaggtaagaggccctcgccctctctccagcaagcttttcaacctctttgaaccaaaggtctggagtactgctgcacagccattgggataatgccattgacttttatgtagatttagtggtgacacaacaagaagaggaagctgtgacatcatgctcacagccatcctgtagtctttagtgttttcccactggtgggaaaggttatgtgcctggtcctttagtggaaaattggagagtccctagtttcccagcaagaattagcacacatcatggttcagccgcctcttctgctcgtatgaggatctttaggctgtgtctaccacacttatttatctcaactgctaaaaaagtaagcttagatatttaacagaaagcagatggtgctgggatctgtaacttgtgttaaacaaaagctgttttggaaatgttcctcctgtccacttttattgttttaaacacatcaacatctctgcctattatgatgaattatttaagaatcactgtcccagtccacggcagcatttcgaagtgcacatgttaatcatatacttgattaaacctttccttgcctttttctccagcatttcagttgcctctgagtgagtaacagttgcagcgagagcaccaacattggaagcagccagtggcatccaaactactgagagccgcaccatggagagggacacttgtgatgtactctctcggagcaaaagtgtaagtacctttcttcttcacttgttttgtaaaatgtgcacttacaacatttctagctttcttggatttaatgctgtggtgttgcagttaggtttgtggttaacctttggttagctttcagtactctaaccgtatgtagattgtgaacaaaggaagtctcattcatccgtgtggcctagttgctatttgatgggtctcctttgcaatatagatgcctttccactcattcacataagcttcattgcatgatgctgagcaccctgatatttgagtgcatgaaataaatatgtagttaaagttaaaatagaaaaaatatgtcttgactatcaatctgtctagatcaatccaaaggtatatattgaaagcaagtgtgttaaaggtacttatcaggtaaacacattctgaaactccatcccttcattagctccccactctggcataggtctctaactacccgttttagtcttcctttctaatgtctttaagttgcccttctctttgctctgaggtgctttaagcatttgttcgaattgtacagtgcctgtaaggtaccagactcgtgacaaatttgagttttctattatcttacgagggaataaacaacacaaaataaggagagcagtcggagaaaagctgtaccaggcgaggatgaatgcagatctaatttccaccagacaagttctaacaatatgtccctttgttcacttacccaaggggaagaagcatccaaacagatgtgcttgtgacgtaggaacactcatttgaaggcatcaggaaaaccacaaatgcaaacacattgctctagtgtggaaatgctttgtgttttgtcctaagatcctacctcgcccaaggccatctttcattcttcctacagaacagggatgagcgtgtagagaggacaagttagtgtgccttacagcattaaaaaaaaaaaaaaaaaaaaaaaaaaaaaaaaaaaaaaaggctatactgagagatatgctgccagtcatttgattgattcccaagcttaataaccaactaaataaattcaacaaattggtgaagtgttcacattcatttgttttagtcgttggtctttggttatatggaattttgcataacataaaaggccagagccttgtgcctagaattcctttcatcattgtacagagttgctcattttaatagggattacctgcatacaaattaccaagctaagaacacgcctgttactgggttttcttgttttaaatcaaatatgatttgtatcatatcaatatgatacttccttttgttgaatgtcaggggcacatggtttgaaaaaaaattagaaaggtgaagaggagagcattttggataattaaaacataccatttagttcttctccattcttggagggaaaaatcttctaatggtaaccgactccatggggtgactttaagggagcaagagtgttgaatgattctagaagtttcctgtttgcctttgttttgtgcactgtttcttcttctctcggcaaaatggaaggctgaagcttcccagaccatgagagcttgaactgcccacattcaggtggcaggagcggccggccgggttctcatttgcttgcatcctccaaagcccctggcgcagagagagctcttgcattttgcccacacagctgagtgactccgagcagggtatgactccttatctgagaaatgaggtggctgatgtactagtaagaatgtgccacttctgcatttgaagtgtggtctggtggcatgtcacctctacccattaaccctttgccaggatagagtccacccccagaagcagcaatttccgttttgttaaagaacgttcaaataacttaatttaagaactgtcaactctttgtttgggcattatttcatttggcaatttaaaaataataaacatgaaatgggaagactgtttctgtgattgttcacgtgttgttgcgtgcgaagagcctgtatctgtcaacatgaatggaagcatatcggtcacgtgttgctgaatagatcctgtgcctgtcactgtgaatctaggtgcagttttttacttcagtgacaaactgaaaagaagcgactaatgaaagaaagggcttatgatgtcgcacagtttgaggttttagttgaatatggcaagggaagtgtggtgtaaggggttggccacaaggcatgtatagtcagtcagtcagcaagcacctgctggctcctcccccattcctcttttcattcaattctgggccccaggccctggagtgatgttatatacaataaacgaaggtttcctttcttcatgcagagctttctggatatcacattgaccaacacatacacatatgtgtctcctatgtgatttaagtataaagttaacaatgaagactgaccattgcataaggcatacaagagaagaatgggttaagactatttttagatggacaccttattagtgtgttcctttctgagaagagtaacaatgtagtttgcaacacttagacaatctctatttactgtagaagataaaggcataaaaggggagtgaagcagattcctgctcaaattcactttggagtttaggtctcacgcgcattcataagtaagtcaggctggcttatatcataaaataccagattggtgacttaaatacaaatgtattcttttgaaaaagttagaggctgagactcccaagagccaggtacacacaagtcatttatggtgacagatcacctcctagctttctgatgccttgtagttagcagcatcctcactggacctcacagagctctgcagccccttcttactagctccatcttcccaaactcctctcacccccactgctgatgaacacctttacactgagatccagggatgtaacatctgaatttaggcaaggcacaaacatttatttagcttataaagatttgacattcttttttaaattaattaactaattagtttttacttattcactttaaaatgccatataatgtccttttcctggtcacttcctcctacaacccttcctccatcccacaacccttccccaattcactcctcccctctcctgggagctagtcagtttgatattcttacaaaattatttcagtgtgtcactgggatatataaacccaatatggtcaatactgaagaatcatcatattatttcaactgtgtgacattagaaaaatcatgatttcctgttttcctagtttatatttgagaactccttggggtggttttgagtgtccaagcaactcttcacagacttagaggttcattttaatttttctctgaaatattgttttgctctgacattattacttttacttattatacgtatctctcacttattgtatgtaatcctttccttaacatctatcaccatacgacaaggccactgctttctgaaatgccttactctgccagtggatgtaccaaattggactcaatggaggtgcaggggatagtggtgatggtggtggaggtaagcagagggaaaggaagagggagagggagggggaggaaagggagaaggagagaatgttggataagtatagagaaggggaaagctggggaggcaggatgaatatgatcacaatattattatacgaagttttcaaagaattaatgaaagtatgatttaaaaatgtcaacatgcatgagaggtccacaggagcttgaacctaacggagatttgattctctatacttggttccaaagttctgtgaaaataaagttcttacttaaaagaatgattccttacaatacagctcttctgttatcctctgaactcgtgattttttttaaaaatagatcttatatgatcaaggaagtggatacattttaataattcactaatcagtccttttatatgttgaattctaaggtatcttttatgatttttacctaaaactcccaatttgagtagcctaaatcctctggaagagatttgagatgtcatctgctcaattagattctttattttcttgacgaaattgccctctgtctcgggattcttttggatgttctacattgggacaaatgtgtcactcaccagatgtctttaattgatgttccctgttctcttgggcagaattgttgtttagtgtttattcagagctggaagtaattcctggctgtttgcagtgcagtgaaaatccagaatttctttttttttttttttttgctttttttttttgctttttcaaatgccaaactagaagcccgctatgtaggctatcagcgtgaatcaaggaactgggttctgctctggtgggatgtgtcagtgcattctctaaaattgcttcttgtcatacataggtggttttttaaaaaaatgctatctaaagctcatatactaagtgtatcctgctcttaaaaaaaaataaacattttccaattgtatctttaccctggctgattctgtatggatgtggctactctcctgctgacccagagtgaagtgatgcatgctgtttcatccacatctctctgtaagggtacccacccggtgaggagaggccaaaaggaaccatggaaggaacgatccattttgtactagcactgcagaaccgccttcatttgttattccttccagctactcagagatagtcaggtttgagatttttatggatgaagtaaaactaaaggattccttgccagaccaacctcatttctctactatatccctgcccatctgaggtaccctgctgtagagttgtattagtgtacaattcaggcaaattaaagaagttagtcccccctccccttttttttactcgtgtttactccctagggtagaagagactcaggagagatactgttactaaaatgttttggaaaacataaattaaaggcaaaataaaaataaaaaataaaaaatcctgccttccgtgctttgccagtcacgaactgaagtgagaacttgtagttttagagatttgattaatttgactattattcccgactcccaggtaatgtttctgttttagaaaaattcaatgaagtatttattaagtggctaagggtatgttaggctccagacatctaatatgaataggatacttgatggtcctaccttcatagaacctacttgacagctgcatttataaattttatgatttattgaaattgcttcgtcagcctggcaccccaggcctgatgacccaagcctatttcactgcttctcaaagactgcagtcctatcccccttcagcctcctcattctctctcttctccacattgtgcataacctctttagaacagatattttagatgtgaataatgtgtcctaattgtcaattatgctcattgttgcagaaacatagattattttagagtagttgaaaagaatttttttcttagataatcaacaatggtataagaatagctgagggtataaacgaatatgagtttagggggaaaaaaaagacttgaagaatagggagtgatcagcagccattggccttgaatcaatcacaggtcacatgactgtcccagcatctaaatcagtcaagaaattgttgtcttagaaaaaaacctcacatttttagatatggtaatgtgtttgctgtttctctttagggcaacttcaagtgggagttgaatttcaagtgattatgaccaagaaataattgtacatatatttttcttaacaatgtaaacaccaataacatatcaaaatgtagagggatcctcttgaattgatgatatatatttttaaaaaatgtgtcttacaggcaggctcgccagtacaaaatggaacaattttaggcaaagcatattaacttgctggagttttctattagtagtatttttttaagagtttttttctcccctttaaaaatgccgtttttttagctgtacccaaattttgatcctgacaatttgtcaattaacgtttactctgtgaaaaagctatcaagggacaagagctcttattgttaaaagaaataaacaagctcaaatgaaatcatcagcatgtttgcctctcatggtgggtgcttctgaaggcgacatgactggtcctaagctcgtctgtggtagtcttggctttcaatctctgggacttgatggaggaaacatgagagaaagcagttaataatcaagtgcccctgaaaatttaccatgagctttcaaggatacgatgagcaaatgatattgaaagctcattatgaaggaaaacaagcaaaaaaaaaaaaacaaaaaacaaaaaacccaaactaacccaaccagtgccaacaaaataattatataatgtccaattctatatgtgtacttctaaaaccaaacactcagtccttagggattttgcagcagaactgatccatcaaacaaatagatcacctagaccttttttattactgaaaaggtgacttatgaggtcataagctacactgtgttgtgcaattgacaattgctgatatattagaccctggtgtttgatagttattaattggcagttcagccaaaagagcatggcttgaatgagttgtgccagagccctgtccttttcttttgtcactgataatcccttcctatatgcctggagttgagcatatggccccatttatagagcacagattaaaaaaaaaaagacagttaaaatgttttattgttgttgtttttgctgctaccctatccccctttttcctaatttattaataggaggttctgtttcagcagccttgcttctgtgttatgaatttgatcatgtgttagctgttaccatccatagcttaattcagtcaacagagtttattaagcccttacagcctgtttgattatgctataacagttatactccgtagaactgcattccaaatggtacttgagagactcagagtcaagataccatggtgtactttggcattgagattttaggcttcacagagtatctggctcactgagcattaaaaaattaaacgtagtaaaactaccttcaaacaagcaataccacaggccaagaaaagcattcttttctatatatccatttaaaacagaaactacaggccatgccttgtaattccttttctttgcttattgaatgtattttaaaatattactaaggccccaacttgtgttatttttctctagaagagcccaattgcacagcattactttgtcagcagggattcatttcaacactatatgaatcacaccaatggagacacaaacactgtccagggacagtagtatctgaagaaatattcaaagatcaacgaaggcctccataaagagatgagggattctgtatacacggagggatggagataataaaagcggttttcttaagtgttcaagtaggaggtcagagcatgcacctcatcaccaaaatgtgtgtgaaataattaggaaagcggcaagataggtgctatggatttgaaaggatttcatattttgacttgcaagaacaattcatgcatcaaaaacatcaggaaaaaagtggaaatcaatgtagagaagagaaacatacattggatgtaggttgaaacttcctgacaggatgacaagaaaggtggctcaggaggtaattgctgctaccaagcctgcagccctgagttcaatcccacatggtggaagtagagaagtgactgtttatatagcaactcatgggacaacacagacacacacacacacacatgcacacacatgcacacatgcacatgcgcacacacacacacacacacacacacacacagtctttaaaaacatttctgggcataatttttttctagtatacatacagtattttggggatttttgaaatgacctcaaatcaaaaattttcccaagtcatggttccttgtgtttgtatttttttcacttcatactacaaattagataaaatttgaatctgttaaatttttaacttctcaccatgagatttacaagaaatttcttgaagccatcattttttgactctgcaattcctaagtcaagtatttctcagaacaggctcaatgaaaaattgtccattatgacaaaaaaaaaaatctgaatttttaaccttaaaatcagctaccattctcccccaaagtctgcataggaagccagttagtaagtggagtctgtctcatctctgctaacagtacttcagttggacatttggtttctctaagaatgaacagaattgaaaatacttcaccaatgtttggaagtataagacacttgtgattttaaataattctttattgctttttaacatagtccatttctctaaacccatgtctgagacaaaggtagaaaggggttgtaatgttttgaaaggctttactttggataaatctgaattgttgtctcagcagttcatctggggtgtatagagtcagtcttttttttattaagacaataaggtttactgttgtgccacatgtggatggtgttgcattgcctcaagagccatgaattataaccaactccagctctgaaatgtgcccaacttcacagaaacaggatgtgatggaaagaaatcgtaatgcaggagaaaacccataggtctggatatgaaaataattacgtctggcacaacctttccctgctgtcctttcttctcagtaaccgatttcctccttgtgctttgcttgtgtccccataatgagagacatttttacttggatcctgcctggtgtccatgcctttccctgacctaagactcaggaggagcccattgcttcaaatctaagtaaacttattcatttcaaaggtacaactctttatacaacacatacttccgtaccgtcttttgtgaaaactatttagatgcagttgtcagcataggagataggaacagtaacctgctttttgttgaaatacagagacaactttctcccaagtaggagaaaaacttttctttagtggaacattttctaaggctatactagttttcaattttagacaaggacacccccattcctccaaaactacttgaagacttgggaattacaatgaatcaaataatcattctttccacctagccgcattacctctgtcattctcagaggaaaccttactttcaaatttttaatgtattggggaattccagtgtgaactatttctcttctgacttaatctcagagttgcaaatctctgcaggaagtcattttcctaccattacatagaggaaaaaatatatacactagacaaaatatatgtccaagacttcttttttattttattttattagatattttctttatttacatttcaaatgctatcctgaaagctcctataccctctcactgccctgtttccctacctacccactcccacttcttggccctggcattcccctgtactggggcatataaagtttgcaagacctaggggcctctcttcccaatgatggctgactaggccatcttctgctacatatgcagctagagacatgagctctgagggtactggttagttcatattgttgttccacctatagggttgcagaccccttcagctccttgggtgctttctctagctcctccattgggggccctgtgtttcgtcctatagatgactgtgagcatccacttctgtatttgccaggcactgttcaagatttctaaataacatactgaaccaccaagattatagggcaacaaggtaccacaaaacctggaaagaccgaatcacctacaaagagaggaagccatcatttgtttgtgtggatgggtagaattcaccagaggacacatgcatcagtaaaaagattcttgctacattttgaataaattactaaaggataaatgtaaggtagcatgaaaatatcgacacagtagatgttgtgggtagtggggtatacatcttatagcagacatttcttctaatatcctttccaggcatccactgggaagattaacagaaacaggagatactgtctccaatagaatgaaatgagaatcataaaagaatgccaaaaatttttgtcttagggcatagtaggatatctttcctggagcacgtttggagatggagatgatgaaggatacaggggaagcaatgtttactctctggggaccaaggtaggaatgtgcatggaggtcagcacttcagtgggaggaggggtgggatgctgcctagaaactcagggacacgttcctgagatcagatttaatcagaacaccagggaatactcttcttgcctgacctcaaccaagaccctaataggtattaggtaaaggtaactagaatttgtcaacaacgaattcaagagacagtttctctttgaggcccaattagtgttagtaaaattgccattgccaagaatttcaactatcaaagaacaagagatctcatttccccagagatatgcaggttactgtggctagtcatagttctaacaaattgagtgtataccagctcctgaccaaatgaaatacacagctcatgctaaagacctagaagaaggaaacataatcagattcattttaacccccccccccaaaatatgtattcctctatctgctatcctatatggtctctagctttcagcaaagaaagtatatgccaagtgagatgatgggagaaacacataaagtagtaatgcagaaaagcagcctagaaggggagaagctttgcggctaatagtgtgaggaatgacgattagttgtttcaaagctctgagggaaaagtttggcagcatgtgagaacagatgcataatgtgcagagatagagattagaagcaaaatcatgctggcatatgcaatagtgtctaggtttggtggatgtttatgtgatggatccccaggttggacagtctctggatgatccttctttctgtctcagctccaaacattgtctctgtaactacttccatgggtattttgttccctattctaaggaggaatgacgtattcacatgttggtcttccttctttttgattttcttgtgttttgcaaattgtatcttgggtattctaggtttctgggctaatatttacttataagtgagtgcatatcaagtgacttcttttgtgattgggttacctcactcaggatgatatcctccagatccatccatttgcctaagaatttcataaattcattctttttaatagccgagtagtactccattgtgtaaatgtaccacattttctgtatccattcctctgttgagggacatctgtgttctttccagtttctagctgttataaataaagctgctatgaacatagtggagcatgtgtccttattacaagttggaacatcttttgggtatataccatatgccagcaagattttgctgacaggaccctgatatagctgtctcttgtgaggctatgccagtacctggcaaatacagaagtggatgctctcagtcatctattggatggaacacagggcccccaatggaggacctagagaaagtactcaaggagctgaagggttctgcaaccctataggaggaacaacaatatgaaccaaccaatatccccagagctcatgtctctagctgcatatgtagcagaagatggcctagtcagccatcattgggaggagaggcccttggtcttgcaaagattatatgctgtagtacaggggaatgccagggccaggaagcaggagtgggtgggttggggagcagggaggggggagagcataagggactttcaggatagcatttgaaatgtaaatgaagaaaatatctaataaaaaattgtttttggaaaaaacaaaacaaaacattagaagaaagaaggagacagaattgctagggggaaatgctaattagaaattaaatctaaggctatttgtagactggatgaagctaaagaaagaatcagtgaccttgaagataaatcagcagaaattatacaaactagaatttaaagagaaagaagggtgggggagggggaaagatggtgaaagagagaggtggaaaaagaaagaggaaagaaagagacaatagattaataaatgtggtataatgattaatgatataacttgtgtaatggaaaattataaaataactatatataatataatataacatataattataaaataatatatagaagaaatattttaagaaataatggtgtaaattctttaaaattgatgaaatactccaaattacagctttaaaagccaagagtgtactaaacaagatataaatcaagatacaacacaggagagaaagagagagagagagagagagagagagagagagggaggcaggcaggaggaaaaggagaaggagagggaatattaaagaatgacagagaaaaatcttaaaggcatctatctagggagataattgcaaaccgcttacagagtaacaaggataagaattacagtaaattttgctgtggaaaccatctaaactagaagcaagtacctagtaagaacaatctttatatataaggcaaaaatctttcttactttggaccttttctggtttgcattttctcagatgtctactaagtaatgtgtaagcatgcctcattttcttccattcttcacattgaggagtatgtagatagttctcttattttgtaccttaattcatttatttaattccttcattgtatcataggatgtggccagttatttgtgaataaagctattgctctattgggtcattgggaaatagaattattccacagagaagacaagaatattttgcctaataaaatattttaatctgtccttagtcaagagaaaaatctagggaaagatagtgctattagaaggctataaaaagcaaggaggaagtgagaagattctgcagggatacaaccatgattggaagggatttccagttggatctagagcagagcttttggttaacatgacattaggggcagtgaagcccagtgacagtggacgaaggtgcatggtttgcctatctcctttggactctcctttccattttctataaatgcaacaacattggaacaatgccccaggacactaaaatttctgtattttctcttgagctgaagcaaggaggaaaagagtggggacctgagtagaagctgtgatggttgtgaaattggaacaaggctcaggaggaactgtgacaattctagctaggcatgcaggagtcgttcattctgtgatatgtcaagaaataattatcagggctctgaatggctcttggctcttagttaactgtggaatgggctttacttattctgtttgcccaccaaagtctgaatatgtggtccgtttaagactatcactttatttttttattattatgggtgtcttgcttatatcaatgaataaggtcaaagatgaactgaagatattaagtgaaaggttccacaagtcaactgtttcatgaattttacattccatgaaattctcaggtgtcttatgaaagcacatactgcccttcttcatcgtagagagtaagtccctttgcccagtgaacccatgctgcattcgttatatcctgtgagtatcataattgctcttgctgtcagattgactgtggaggtattgcaagtatcttatcccatcacctcttggacaagtggactaatatcacataacacctctctcatatcataccacaccatcacaagcagaactgaatgtactatattttgagaaaagttgtacagttccataacttctgttataattaatctatttttattgttggcagtttgcagagtttcaattataaattaagcttaaccataggtatatatttatatgattttaaaaagaacttaaagtgctcagtactatttgtggtttcaggtatccttttcttttttcttttttttaacaaatggataatttatgttccaggcaagatgaagtagaagaatgtgtgatttcatcatcgtgcatacagaatgctatataatttaaaacatgaattatttctgagattttccttttaatgtttgcagattgcagtggactttgggtaactaaacttggagaatgaaactatttgctcctggcagaatactgtatttgcacacacagaaactgcaagtgtatactggaacatgtagatccacaagaccatgtttagttaatagtgggctagaccagtacactaggtgcaaagtagatggccactatctcacatcaccaaggagtctttagatactttaatataataatggtaaagtctacttattacctgtggtggtttgaataggtttgcctccccccatagattcatgtctttgaatgcttgacccatagggagtggcactattaggatgtgtggccatgttggaggaagtatgtcactgtggggataggctttgagatctcctatgctcaagctccaccccatgtggaattcagtttccttcttgctgcttttcaaacaaaatatagaattcttggctgctccagcactctgaatgcctgcaggctgctacacttcctgcaatgatgataatggtctaagcctctgaaaatgtaagccagccccagttcaatgtttgcctttataagaattgctttggtcatggtatcacttcataccaatgaaactctcactaagacatcatctatttactactttaaaaaaagaaacagttacttttataaaaagaaaaataataaaaggagcctttgaacagattccccatggatatagggaacaactacattttgtgtatttatacatgtaaatatatgaacatatatgcaccaaagcacacggaaaaaggctaagctacttcaaattataatgtaaattatttataatatactattagtgaccaatctttattaaatagttatcaaatataataatgtatatacatactgagcatatatttatacttgttttaatccatggttttgtttaaaaccataacatgatattagtaatattattgcccacatatgatagatgagcaaaaggagtttatatttatactaaaaataccttgaactcacatatctgaagaattagcataagaaaagaggcaaagcccctgaaatgtatgtcacttttcataataattctgatcaattaaaaaacttaatatattcatatttcttattgaaagtaaattttggttagatatagagacaaaaactatttttgttttttcataaccttatataaatcataagaattcacctatgcaaagaacaagataattggctcttcagtcccttatggactcttgaatacgtttccctaaaagcttcatttctaattacagaatggtctttctgatctgagtggacttaagtggctagatagatttttgtccttcctggaaaagaggtttacaaacgcatggtgatttctgactgggaagagatttctttcaagcctacccttgggcagtttaaccctttagtctacctcaattcaatatactttctaatttaagttttgtattttattttaactaagcttttattgatcaaatttcacacttattctatgttttacttagagagaagtaaaagacgattctgataattgattgaatatccttttcccccttacagactatccattctgaatgcatttctgtctatgttccatttaggccagtttacgtaatcgactttacctacccaggaatatggtctttctctctctgtctctgtttctgtttctatttctcagtctttgtctctgattctcctcctctgacaattgcagtgtctacatatttcatccctttgaattacagagcagtagcccaatcttatttgtttgtgcttcttagcctttatactcagctgatgtatgtagatatcaacaaatgatggagtctgttctctcttggacagactaaacttattccaattctaatagtattcaactcctgaaggtaaggtcattttgccatagctataaaatgactcttctacatcaataattatgacctagaaatgtacttcctggtacaaattttgttccccaaatttgaaaacagttaagtgcttagaatattgtgtttttccggctgccagcttccatcaatctctgctttgactacacatttttctcctctcaaattcaaactactacatgttttctctatgatcaatgctggaaactaaagagttagagataaatgcactctcagaattgtataaacaatttcttataatttagtaaggcattcttttctgtaatttcatctattatgttattatatatcatctatgtaatcattcttgtttctctctgtggtagtttttcaaagcattataattcttttaacaagtgtgtgtgtgtgtgtgtgtgtgtgtgtgtgtgtgtgtgtgtgtgtgtgtatagacctcattgtggtaactgcagcatgattctcttgagtctgcaaagtgattttcacaaacagtaccttactggaaattcataatgatcttataaattagggtggattatatacttctactgattataatttatcagggaaaggggaattgaaaattcatttgaaatgaacactttaagtccaaactacaagatttgtccattgtctctcctgtgttcatatgcatagactatataacaaggtagaaggattactgttcaaagctaatagctatgctttgctgagtcataaattttactcatctacaataatatagattttaataactacactaattattatgagagctaaaaacaagatataattaaagagaaaatgttaagaaagaaaaaactggcaggaaggagaggagaaacatcatatacaaaaccatgggctgttttctatacaacgatccacatggagtctctgtaagataatgaacacacacaactaagtgagagcaattgttcagtaatcaagaataataaaagctaattgaatagtttggcctttctagttagtactctgtccattttgttagaatcaataacaaagagtaacctaaagataggagagatgtcaaacaagtttatttgaacttgcagtgtgtttatatactcaagtctcacataacaggggcatgcatgacctaacagatgcccaaaggaaaagtataatattgctaaccaacagtgggttagtaaacaaataaagaagatggagtcagaaaactttgtctaatcttcatcttttgccttgactcaagttctgcctccattctatagtggtgatgggttttattatatagtcagacttgggtatttgcagtatgaaggaattctctgtgtacattcaaaggcaaaagttggatttggttggtaattcaatatttcagttgaaaaatatgggcctaattagtgtaagatagtttggaaaaatttaagtagcagttaaatcaatggcagcactagaaattcccagcagtggggcatctcttttgtgttgaggatttttcattggtctttctgtagcatcatcattaatgcacccctacttagcaaggattaattcactccgaagattaccagcagcttttattgtgaaaatttctaacatttgcagcatttcccccctcttaatcttatcagatctggtttatttcctttcaaatgcacctaatgctgaaagaagagctacttggcagtttcacaggtttaataatcatttactttgagctattttacccatatggcggtaggttatcctccagaggatggaaagaatgcatatttggtagtaattgcaagcaagacagtaaaatctataggacatatgttaaggaaagagcccttctttccccctttaatcattagatgatatgagatgcagtcatattaattaatagaaaataatgatgcattccagtgaccttattttgttctgtcagttgatcagagaagagtctggcatagcctgacctaacatgtcttgtgataaagaagagggcctataaaatgattcttgattagaaaagagctaatgaacatttttgttgttgtttttgttttttgtttttggtttttcgagacagggtttctctgtgtagccctggctgtcctggcactcactttgtagaccaggctggcctcgaactcagaaatccgcctgcctctgcctcccgagtgctgggattaaaggcgtgcgccaccacgcccggctcgccaatgaacattttttttccagtgaaagagaaagacaagaatgatggaatttgaaaaatcaagtcaccaaggtctcacttttaaaattaccatgccaagagtatcttctctaagaagttgctatttctttttgttttgtttttaaatagataaaccttagctagctctttgggaacttcatttctctatatttcattcatcccaaaagtcattctctcccaccaatgctggtgatctgaaatggcaaaagttgcatttcagggcttgtcattctgattgtcattctgggatgtgaatcctgtggacaattcagtggtgtccttcatgtaacatgactgctttcaaccagctcctatctcctggaacatctaaattatctcagcatgatctaatcggagtcaaattctttcccattttcttcaactgtaactgccatgttggctacatctgcaagcagaatttccctttctttctcttttcgttttccttcttcgtttttacatttggcattctttttgaactctctctagaatccaagagtgacacaggcattcaactgtctgttttgccaatctagtgttctgctgcttccaagccagttattgaataatccatcgtctgctggatgtggaagcttttgattgtttagctagagtgcaaggagaaaaagaacacaattagctttcagatttcaccagctctggggtcattacttacaaatggcatattcttctcagcctccaggaaaattccattttaaatccaggtctaagtgctacaagatgcccttgagtcttttcctgtttacttgtaaataaaggatttcttttggatatattttttttaatcctcacgtttgatctttactagacattttgaattatcgtttgtggtttaggaatcattggtgtgtttccttaattcattatttcattcacctttatgttaagtgttctggaagaattattttattggattattattttcctttaaaatgaagtattgccacagtgaaatttaatacaacaagctgcagagtaaatcactatttggaaatgaaagagaattaaaggaagctttgtggcatttctgatttgttaatttgaatgacgtgtttaatcaaaaacaaacaaacaaacaagcaaacacagccatttgatagttctcctagcggtctatgctctacagtgtttttacttctgttgtgtggtatgaccagatttatagaaggcagtgagtgttccccaggactgcctttcttcaattttcaatttcacatcagtgtttgcctcactgaacaagtttctgtcccacttcaccaaagaattaggggtcatcgttgagataaagctcctctttatgttacaggatagaacaaataatattacattctgggcaacatagtaatgaaatacatcatgacggagtctctgtgtcagtgtagccaactgcttctcagggaatatccagggctgcagctgatgcctctctgaagtgatctctaattattgaaatcctcaaatagaacagatgcagtttcacatgttatcatgagctctctgctcatccaccttcgccatctgtagaactaggctgtatgcacctctgtacaaagttagagattcctgtctggaaaagcaaagaatgcccctcccccagactgcctaggaaatcaagttgctcaaatgatgtatcatatatttggacccttgcaatttgaaaatattgtaaccgagcattttcttaatccattgtttcattcatctttatgttaagtgttttggaacatattttatttgattattattttccttaaaaatgaagtatggctatagtgaaatttctcaagcatgagagatactcatcagagtaccaaataggcaagcaaagagggaaagagtggacagaatgaatagaaatgttaatgatgcaaactgagaaattgggaagacacgtgttttaactgaccaaggtagtttgtaagacaaagtggtgagcccccgctttcaatgaaagtgatgtgtaagcctacatgcctctttttcccctgtgtacaaaatgaccttgcattttagtcttgtagggtttttggtacagctgctatttgataataacacaatgtgttttccaatttacttagattgttttaaaaaaacagataactgaaagccatctgtgtttctgtgtaaattgttctcaggacagggaccaggaacaaaacatttaaaatcctgctattgaaatctctcattaattgaaggggttctgcaaattcagtctttggtgcctggtgaagagaataccatgcgttgggctttctgtggtaaacccaaaataaatgtcttccttggctctcctcattgagtggtctcatatttcatttttctggcagtgaaaaatgctacaggcattagaatcatcaggaacaattgcttccatgtatgtcctctaagttgaccccaagagattttgacttagtatgtctgggaaaggatctagagacccatattgaacccatctgatgattgagtggtaggtggtcagaggatcactcttgaattaacactgattcctagtggcataattctttatcatgtacatgggagttagggccaggaagtgagagtgggtgggttggggagcaggcgtggggcagggggcaataggggattttcagagaggaaactaggaaaggggataacatttgaaatgtaaataaagaaaatatctaagtaaaaaagaaaaaaaacatatcataaataaataaataaataaataaataaataaaaatttggatgggtatcctgtaactctaatagtacttcaaagtgtaagagaaacacacaaatctcataaacagtcagaatgataaatggacagagcaagtggctaaaacaaaataaaattcaactatggatttgaaatagatcgttagagatatgatggagtctgatcaaactcagtgtcaaggcacagaggacgatctaagatgaatcagaggaagaatgggaaatatttgaagggaaatagttaatttcagttattgacactgaaccgttagctttggagaaccttatcaattttactccagtatgcaattctgctatgtatggaccaggcaattctattttgctaaagctcccaagacaataatataaagtgttttgttgggtttctaatcgtctaatttagagtatcctaattctgttctaaattataaaactatgctcatcctctcaagggcttggaatgtagtcaatggtagatccttgcttatcttatgcaaggctctggactctactcacagcaccttaagagcaagcacacagaaggaaagaaatgaggtctgttaccttcaattcccccacctataagatacaatgtatctttttgctcattaaacgtcttcaaaggatgcacttaccaggaaatggtgagcggccaggttcccggctcactgggtaacaaggccctctctttctttgccactaaatctgtattaaatgttgaaaatcatgtcacttcatccaagttcaagtccctcttcttcagatcagagacattggatagagggttgtttctgtgaacctcaggttaggtagaacgagaaagtcctaagccattttgtccattaccttgcatggtcctcagcacagtctgccatctctagggacaaaaggctatcattggtgtcaaaaaggaaggagaaattcgcagtgtggacactcaattctgggtacaattgtcgttctgatgactgttcttttatgagggacagttgggttgtgagccccagctctccatgtcatgtgttaaattaatttgtcctgggaagtttcttgcaagtgatatggcatgtgctagtataggactagcccaaggaagtgacaatgtcatctttcaatcacaaggcttcccgtttgcatctatatggcaattcattggtggttttcacgaatggtataaataaaacagatgctatgcacacctcttgccattaggtggggcagttgaggagtgggaaataggttcaagtgaaacccattcaccaacagaggcaggtaactgcctttcagtcagtcatggccagattcttagactcttcttcttcctcctcttcctcctcttcctcctcttcctcctcttcctcctcttcctcctcttcctcctcttcctcctcttcctcctcttcctcctcttcctcctcttcctcctcttcctcctcctcctcctcttgctcctcttcctcctcttcctcctnnnnnnnnnnnnnnnnnnnnnnnnnnnnnnnnnnnnnnngagctttcaggcaactcctccattgtccttttccaggaaaatggttaatgcgtgtgaggctgggagataaaatcgcaggattttggaaatccaggaagtagatagaagctgtggcgatcatttcagcgctcccctctgctcctatcgatttccactaaaatccattccttcccctttcactgtcttctggaaaagtctatgtcaattaatttacctgatgtcttaatggataattcattaagaaaatgttttgtgccaaatgtatcgtgatgaattttggttgctaatgtttccttggctctacttggaagtgtctttattgacccactcatagatttaagatgtttccatagaactttaaaaatgacctagggaaatttcaaatcactcttaatgattgtgactttaactttccctagtaaatgcatacacttaaggcacagaggaagaggtcctgagaggaagatatgagaagtaggggagaggcaggaacagtatttccggttacttgagttttatcttcttaaaagaaagtctttatctccataataaagcatgttgccaggaaagagatgatgtggaaatttatatagcttctgaaggaggtttttttattttctcataaataaatcaaagagatttggatgtttagaaaggaagaatgaggaaagaagaaatctagaagtacttcagtgggtgaatgaagaattggacaaatgtgatggattgctgcttactctggaccagctacgttgtgtttcccactttccctcttatgctcttactttttatcagtatctgtagaaaccttaatagttagaagtccctgcaatttccagaactttgtacttgattagtttcagaatctcagcaaatttgcatgagcttttcagaggaccaaaaacagagagatgactacatttgatttaaattgctaacatttaaaatgatgctcaattgcacaggagagtttggaaacagactggatttctgcattgctataatcttaaatggcagccagcatctatcacatcctcctgagagttcagtccttaatttccaagaaacgattccaagagcaagatgagaatcaggttgagtggctttgtccagtgagaggcacatagaacttgcttttcaacttaataataaaaacattcaaaattttaaattatttactacatattagacacaaacctatgaatgtaaccttcatgtgatcctcagaataatcttgtgagtctgatgctgctaacaccctaggtattaatcatagggctgtttctgaagccatctttgttagtgtgtgtatgtgtgttcatggggtcacacacttttatagatgtgtgtgctcaaaaaggagaccctgagttggatctccagcatccatagaaaacaaaaacaaatgaacaaacaaacaaacaacaacaacaaaaacaagtgcagtgactggtgcttgtaaccccagtgctagggaggtggagatgggcagatagatccttggggctcactagtcagtcttcttatttgagtcaatgagccttgaagagacaccaatctcaaaaaatgagatagacagctcctggaaaatgacaccaaggttgacctctgctcttcaaaggcatctctatatatgcatgtgtaacctctcagaacatgtgcataaacctatacagagaagtgtctgtgcacacatacatacatggtacaactgttctttgaacagagatttttttagccatcgtctgaaatgtagaactctcatcattcccttctattcctagctttcttaattacctgttttcagtactcatcactgtctgccatcttttagaagtttatactaaactggttctctcttctaccttcatggggatgggtattgtactgattttgtcatgtatctataacacagtctagtttaatttaattcaatgttcaataaattctagttctagtttagtttaattagtttcatgttcaataaagagaagtataaatcaaataaggaaattcttgtgataagtgatcaaaaatcattcttaactaaagtgtaaggaataaaaaaatgagcaaacacagagtattttcatctatcagcaatgagggaaacatctttaatatgtgtgctcatggtgtgatacaaagcacagaatataaaactgaaacactttgttggacagaagtttgaaaatatacatatgtaaaaatacttctataccatgtttaaatcctatgaatatattcaggaaaaatcaaaaaattaaaagatagcttttgatgcaaaacaaagtttacttttccagtataaaatttgaccttagtgtgttttggggacccactggagttgtagtctctgcaggagtaaaaagatgtaaagtcttaagaatgttatcatatcatttcaacttcaaaggatcttttcaaacttgtattctagtcaatgagatgcaataagttaaatttaataatcattcatacatatacacatacatatatgcatacatatatagtcatatatcctacatggataaccttctttagagattgtgtaatagttgttgaattaacttgaacaaagtaaagatgctgaattggatagagagaccaagcagacaggattgagagggcttccttcagaaagtggaagtagaaagatttactgaagttcaatctttagatagcccagactccagataggtagttctttctctttccctagtagcttgaaagataataaaatagtctttggatagttagacacagttttacttaacgatatggcccccaacatccctgctctataaatggattaatttgactacacattatctcattcttccgtgatcatattgaccagacacagtaaaacagctgaaacactggggcagaaaggtaaagatcaaggcttaataagagatatcttatattatttgattcgttgaattcaaagttgatgaactactgggttcttttcaaaacatgccttaattgttaggtaggttttcttgaggaatagaagatctcaaaagttgtttgagcttaagtattgagatggaggaagatgcaggaagaaaatacattataagtaaacctctagttataatctagtaaactagttgtactttattgagataaaaatgataagtaatatcctcatagcttgataaatatttgtgaagtgaatttaagttgcttcatttttaattaaccattcattaagttaaaccaatattttcttacatgaataattgaaaaattcaatatttatttcaaggatgagattgctgcaatctcagagctcagaagatggaggaaaaagaattgaatatttgagaccagttaaggctacatagcaagatcttgtatcaataagtgaataaataaataaaaaattaataaagtatacaaatataaacctcactccagactattcaaagaactggtacaaataaaaagagtgacataagaatatcattatattcttagatatacaaatgtataatatatagaaatctaaaaatggacaaaaatggagctctcacattcaaaaaaacacatgaaaagggccttagaactagataaaaccaaaaccatgagtcataactgctgtacatttgtggggatttctaaaataaaatagataacatacagtgttgacaagaatatggatcaccccagtaattagctttgaacaactgtgtggaagtatttattagagctatacatatacacaaactatttcccagatattattctcttaggtacaaagcaaatgaagtttcatgcaaaacttaattaaaagactgttcaagaatgttgatagtaactcaataatacttagttgctcatcaatagcataggctcaatgatgaaatctaactatggtcccacagttttaatgccaataagccctgataactactaaattacaagtgctgcattcaagcatattgatgagttcttaagatatcaatatgacagcacacaaaaaagagtactttgtaactccagttatataaagtgaagaaaagacagaagtattgattgttgtttgggctgaaggaactggatttaagggcacatggggaacttatacttctttgggtgctattatgtgctatattttttgtaaaattctaatgatacatatagttattttctgtacgttttaatatatgccaaaattaagacttataagaatctttataactattttattttttctttttcctctctatttatctgcaaatttcatttcattttgctttagggttaaataaaatttattgtatacaagtatcacatttttattatccatttatctgttgatgaacacctaagctatttcttttcttttttttttttggagaggaaagagtttatttcatcttatatcttatagtacattatgagtggtagttaggacagaaaagcaaacacaaacttggaggcaggcactgaagaagaggtcatgaaggaatagaatttctatcttgtgcagactgaattcttattccagctgttcatggatggcaattgcaataataaatcatcagtcaagaaaatactcaatgatattttgcttactagacaatctgatggagatattttctcaactgaagtttcctttctcagtttgactcttgttagactctatttgattttttaaaaaaagaaaagaaagaaaggaagaaagaaagaaagaaagaaagaaagaaagaaagaaagaaagaaagaaagaaagaaagaaaggaaaaaggaaggaaggagggatggaggaaaggaggaagagagagagagagagagagagagagagagagagagagagagagagagagagagagagagagagatattgattttctcaaagaaccagctcctggttttgttgattctttgtacagttctttttgtttctacttggttaatttcagccctgagtttgattatttactgctttctactcctcttggatgtatttgcttccttttgttctagagcttttcaggtgttctctcaagctgctagtgtaagctctcttcagtttctttttggagacttaaagctatgacttttcctcttagcactgctttcattgtaccccgtaagtttgggtatgttgtgccttcattttcattaaattctataaagtctttaatttctttcttttctttcttcattgagttggacattgttcagcttcaatgtgtatatgggctttctgttgtttttgtcattattgaagatctgccttcctccatggtgatctgttagaatgcataggattatttcaatcttattctatctgttgaggcctattttgtgaccaattatatggtcagttttagagaaggtaccatgaggtgctaagaaggaagtatattcttttgctttagggtgaaatgttccatagctatctgttaaattcttttggtctatcacttctgtgcctctgtttaggttctatttccatgatctgtccattgatgagagtggggtgttgaagtctcccactataattgtgtgcaatgaaatatgtgctttgaacattagtaaaatttcttttaagaatgtgagttaccttgcatttggagtgtagatgtttagaattgagaattcttcttattagatttttcctttgatgagtataaagtgtccttccttatcttttttgataacttttggttgaaagttgattttattcaatatcagaatgtctactccagcttgtttattgggaccatttgcttggaaaattgtcttttagccctttactctgaggtagtgtttgtctttgatattgaggtgtgtttcttgtatggaacaatatgctgggtcccgtttccgtatccagtctcttagtctatgtgtttttattgggaaattgagtccattgatgttaagagatattaaggaatagtgattgttgcttcctgttatttttggtgttagaggtggaattatatttgtgtggctatctttttttaggtttgttgaaagaagattattttcgtgatttttctagagtttagtttccctccttgtgttggagttttccatctattatcatttgtagggctggatttgtggaaagatattgtctaaatttggttttgtcatggaatatcttggtttctccatttatggcaattgagagttttgctgggtatagtagcctgggctggtgtttgtgttctcttagggtctttatgacatctgtccagaatcttctagctttcatagtctctggtgagtagtctggtgtaattctgataggtctgcttgtatatgtcacttgacctttttcctttactgcttttaatattctttctttgttttgtgcattaggagctttgactatttatgtgacaagaggacattcttttctggtccagtctatttggagttctgtaggcttcttgtatgtttatgggcatctttttctttaggttagagaagttttcttctataattttgttgaagatatttactggccctttaagttaagaatctccactctcttctgtacctattattttcttaggtttggtcttcacattgtgttctggattttctggatgttttgggttaggagcttgttacattttgcatttctttgactgttgtctcaatgttttctatggtatcttctgcacccaagattctctcttctatctcttatattctgctggtgatgcttgcatctatgactactgatctctttcctaggtttcctatttccagggttgtctccctattgatgcaatttccatttttagatcctggatggttttcttcaattcctttacctgtttggttgtgttttcctgcaattctttaaggaatttttgtgtttcttcttaaagggcttttacctgattacctctgttctcctgtatttctttaagagtgttatttatgttcttcttaagtcctctatcatcatcatatataactttaaatcagagtcttgcttttctggtgtgttggggtatccaggacttgctgtggtgggagaactgggttctgatgatgccaagtagccttggtttctgttacttatgtccttgcctttgcctcttaccatctagatatctctggtgttaactgctcttgctgtctctgactgtggcttgtccctcctgcaagcctgtatattagtacccctgggagttctctccaagataaatttgggtgtggagaactgtggcacagggtcagctccaaggtgcagacagaaactggaaggatcctgtccctggttgttccttggtccctgtatcctggtgactctgggctggtccctcttgggtcacgaattggagcagaaaaggtggtgttacctgtgctcacgggtatgatagcactcctgagagacaagttctctgctggcagtatttgggtatggagcactgtggcacaggattagctttgggcactgtggcacaggatcagctcaaggtgctgacagaaacctgaaggatcttattgaatcctactccttcagttcctgtgccctgaggtctccaggcgggtcccttggagtagaagcggtggtcttccctgtgctcacaggtgtgccagcactcctgggagaccagctctctcctagcaatatttgggaatggagcattgtgacacaggatcagctccaggtgcagacagaaattagaagctataaatttttccaattatcttactaaaagctgacactgaagttaccatataatgtaccataaacatattccgagagtatctcctgatatgatcccatgatgtcatgagaagcattttattttaaaaattattctattaattaatatgcaaaatacgctagccaaaattaagtgttgaaacacacttttgtgttacttttaatttcctgtaattgtgttatttattcctttactttttggtagaaagaacattgatacctggggacatagcttagcgaggaagggggtccttgtttaacaagcatcaggatctgaggacatgagttcaaattcctattatccacacacacacacacacacacacacacacacacacacacacacacacacacaatgcaaaagtccagcatgactgcatacctgtattctaacagaggggatgaaggcaggtggattctgagagcttgctggacagccaaccaaactaaaataattagcttctgactcagtgagaggtcgtgtgtcaatgcatagagcagagagaaatagaggagtatgcctgatatcttgctttggtctctgcttacacttaaaccacaaatacatacatgcgggaaaaagagagacgggggggggggggggaggaaagaaaaaaacattgagactaaaattttctatcttaagtgtgtgttgtatgattattgagtatagacactatgttgcaatgtaatctttaggatatatttcatgttacataactgaagttttttattcattaagaatcaagccttagtttccttctcacagtgctctagcaatcccaattctaagtnnnnnnnnnnnnnnnnnnnnnnnnntctctctctctctctctctctctctctctctccctcactctcttattttcacttattcactttacaacctactcactgctcattcctgggcacccatccccttccactctgagtggaattataccccactctggcacgtcaagtctatgtggggctaagtacaacatctcccacaggcagtcctgctagaagaacctttcccacatacagaaaacagcttttggaataactgctggctttatttgtttaggaaccatattaaaaccaagctgcacattagcttcatgtttgaggaagcctaggtccaacctatatatgttcttttgttggtggttcagtctctgagagtcccaaggatttaagttagttgactctgttagtcttcctgtggagttcctctccccttcagagacccaaaatacttcctcctattcttcaataagagtgcccaagctccacccactctttggctgtggctgtctgcttctgtctgagtcagccgctggatggagtctctcagaagactgccatgctaggcttctgtctgtaacaataacagagtatcattaatagtgtcaagaattggtgcttgcccatgggataggtctcaatttgggcctgttattgattggccagtctttcagtctgctctatctctgtccctgtatttcttgtagacaggataaattttgggttgacagttttgtgggtgggctagtgtccttattgttctactggggttcctgtctggctacaggaggtggcatattcaagttccatatccccaatgctgtgagtcacagctaagatcacccccattgattcttgagtgcttcccttaaactaggttgccaggagctaccaaagagaagctgaaacctagcaggtgatcttcctaagatggttctgccattcttatgggtgtaaaatgtaactccaaagttgttttgattttcatttccatgatgactaaggacttataacatttctcagtgcttctcaactgttcaagatccctcttttgagaattctttgtttagttgtgtgccccatttttaattgggttatttgggttgttggtgtttaacttcttgagttctttataacttttggatattagccctctgtcagagatagggttgatgaagatccttgtccaatctgtaggctgctgttttgtcctattggcagtgtcctttgccttacagaagctttgcagtttcatttatctctgtttagttttgtctggatgacttgtcagttgatgagagtggggtgttgaaatatcccactattaatatgcacagtttgatgtgtgatttaagctttaacaatgtttctttaacaaatataggttcccctatgtttgggacatagacatttagaattgagatatcatcttgatagatatttactttgatgagtatgaagtatcttttcctgtttcttttgattaattttagttgaaagtctatttgattagatattagaatagctactccaaatttgcttcttggctctgtttgcttgaaaaacttttttccagtcctttaccctgaggtaatgtctatctttattgctgaggtgtgttcttcattcagcagaatgacggatcctgttttagcatccattcggttagcctgtgtttttctttttctttctttttttttttaattggggaattgaatccatgcatgttaatagcaattgttatttcttgttattttgatgttggtagtattagtgtgtgtttctgtatgtgtgtgtgtgtgtgtgtgtgtgtgtgtgtgtgtgtgtgtgtgcattttcctgtttttttttttttgttttttttttctggcatggggttacttatttcctgtattttcttggatatgattatcccccttgagttggagttttccttctaatatgttctgtatggttgtatttgtggatagatattgtttgaatttggatttgtcttgaaatatcttgttttctccatcagtggtgattgatagttttgctggcaactgtggctttatagaggttgcaagatatctgtccaggctttctagcttttacagtttctgttgagaagttgattataattctgataggtctgcctttgtatgttacctggccctttccttcttgccactattaatattttctattatcatccagtctccttggtattctgtaagcttcttctatgtttatatgcactgctttctgtaggttggaaagttttcttttataattttgttgaaaatattttctggtctatggagctggggctcttcatcttcttatatttttattattcttaggttaggtcttttcatgataacccatatttcctggatgttttgtctcagcaattttttttagatgtagcattttctctgactgatgtattaatttctactattgtatcttctatacctgtgattctctcttccttcgtttatattctgttggtgatatggctgcatctggtgtttctgttctcttccctagcttttccatctctaggatccccccccccatttatgttttatttattgcttctatttccattttcaggacttgaacaattttatttatttccttcactcatttaattgtattttcctgcattgctttaagggatttatttgtttcttctttaaagatgtctatcatccttataagattaaaatgataataattttcttgtgttccagttgtgttttgatatccagggcttgctggtgtagggtagctatgctctggtggtatcatactgccctggcttttgttgtttgtgttatttcaagggccttttgctatctagatggctttgttccctggatgttacagttgcaatagatattggcagaggtttaacctcaatggtcctggtgtgataagcctctgatgggtatccttaggctgtatggttctagagctgcaggttcaatgatggtgggcagagaggtggtgggagaatagaggttcagaggggatagcaggctattcagggcagcttggtatatcccagaagatttggtgagcaagagagatggggaagggaagggaagggaagggaannnnnnnnnnnnnnnnnnnnnnnnnnnnnnnnnnnnnnnnnnnnnnnnnnnnggaggggaaggctacctctatagttcaagaccttcaggtctggtgaaggtggagagaggtggcaggagaatgctgatccccttgggatttctttaacatatatgcatgtccaagagtagaattcctgaatcatatactagttctgttattgtttttaatttttgaagactgttcatattatttttcatacagttatactaactttcactcctgctcaaactgcataagggctccattttatccttgacaatatttgttttgtatcatttgtctttgacgttttttactaaagccattctaacaggtttgtggtaatatttctttgtagtttgaatttgtgtttctaggagattattgattacgaacatgttttattgtccagccatgagcatatcttattttaaaaatgtttacttaggtctacaaagatagatcatggtttaagagagcacattcctcttgcagaagacatcagctaggtttccagtacccatatcaggtgattcacaactgattttaacacatacttaaaataaacctactaagaaaacatttttttaagagaaattttccatttagatcacagatactcttttttaaaatatctggtatgttcttttttattttcttgaaaacaaaaatttcttgaaaactacaatttcttttaccccaactacttacagatcctaccacctttctatgtaaccagtactatactcttccttctgtctctcactttagtaaacaaagagagaaaatttccacaaatataaacaaaaacaaatagaaaacataaatatcacaagaaatatacacaggaaccaagaagctagatcacatcatttaatactgtgacttgtggctacatatagaatctcatgattgatttcagggttcataaaaaatttggcaacagtgaaaagtttctgaacacaaaaaatgtaattcatacctatgcctaatgaatatgtggtgttactagcagtgcaggcccatcacagtgcttcaatggaaacatagatatacaattggtaatttctcgccagtatgtggaatgctgttgagcacttcccaaaatgcatcagcataaattcaaggagcttgaatgctatgactgagctgttgtgtcttcactacaccgatttctgctatttcatatgaaacacaatgataaaactatggaaaataaagactttccttcccagtacacttcatttgttaatgtgactgtcaatcactcataatattatcattgggcatgctctttcaaataaaataatttaggtatgtcctgcagtatcagaggcttgaacttaattcttttgtgtatgtgcagctaaatctgcacgttgtctaagtgctagagaccataggttgatgccaagcatcttcctcggtcattttctaccttatgttttaagacaagggatctccatgaatatggagctggaaaataagactaagttggccggacagcaagccccagggacccacctttctcagcctcctcagaactggatttgcaggaatatgactccttaacaagctttttgcatgtgggtattggtgattaaatacaggttttcatgcctacaaggcagatagtgtattggctgagccatatttatttctttatatagaaataaaaagatcatatggattctgttagtattcaaatttgttttatctgtagtatataacacataccaaaaagttggtgtcatacatatgagaattctccaataaaaccatgatcataaaaaatttgacaacagtgataagtttctgaacacaaaaaagtcattcatacaaatgcataatgaatatgtggtgttcctagtagtgcaggcccatcatagtgcttcaacggaaacctttattatttttttatgatttatagtgtttataatattatagatagatagatagatagatagatagatagatagatagatagatagatagatagattgatagatagataggggaactcaagactcacctgaacataggctattgctgttgctcttagttgtctcttagttgttaaaagtaagatcttattgctgaagtcatgatgcactgcatacacaagacccagaggatctggatctaacttcgaagcctccttcctgagaaatagctatcatagtaacagatggtgctctataaacttctaggggagggaaaacaccaatagtcccacacagctataatgacgagaaaccccacggatggcctgtatggaaagatatctgtgagtatgcaacagtggtactatcatcttggtaaccaacagttctctaattgaacttcagtctgaatcaataaacataggtgagtagttatttagaggagcaatagcaatttactagtgtttataatactgaagaaaatgtccttgtctagcgaccatcaactgcctatagatccccagggaggaaccatgcttgtgagcccctcctcttccgaggatagaatgttgatgggctcatccttgtgcaggtatttcccacataatctttgtccctaagattccaagagtgtaatagcccaagttatatccagaacacagaattccaaaccacctcactgtttccctactcctctttcatgatgctaactaaatcgtgaaggggtactataaatgtcccatgtaggattaatcattcaataggtacttattcttaaaacttagaccactcatgggtttctgtagtaacaagctgcagtagcatcaatatacaggtataaacatgaatatttagaaagatggttcatccatttagcagaacaaccccatgaactcttcctacttcaagtgtatggcatctctagttgtaaacttttgagcaggtttgcagtgccaagtgtgaattccctcctgtcagtcaggccacagttacaatcagaaagtgtctggctacttatacagcagtcattctattattggaccaggaagcataggttacctggaaagtcagtaatagagcatgcagggtctacagctgaataaaatcgttattgacagttctcttccattattctgcatagaaacgtctagcactatgaaagggccagcaatggtgatgctgtcagctcagttccagcttgatttctctatgtgccgcaaccaaataaggtggtgtctttagcaatagcgcctatcctctagttctggtgagcaaccaaaaagaaatgcaatagtctgtgttcttttcctaggtctcatggaaacaaatcacaaggatgtagcctaactttggctccacgagcttcactcaataatgttatgtcttgtgggcgaagattcgttaactctagtagggtgactccaatcattttaaaattaggtttaaatgtgtttgttttatttatgtgcatgtgtatgtgctaggatgggtttatgtgtagcatatgtatgcaggtgcttgtgggactagaggttgtaggatctcttggaaccggggttgtaggtggttgagaaccacctgaactgtgtactaggaacccaaaccaatgtcttctgcaagatctgtaaaccctgctaagccacctcctctacctcttaatcaagtttggaaagaatgggtacatatgtgttcccatatgttgtactaagggtaaggggccatgaaagcaaatgtactttaaaaatggcttttaaataaagttccttgataaatatcattatcaaaaattctggtatacttattctatataccccatatgtgcaaaagtttctctggataatggagattgcagtgaaagaaaaaagggttggaaacgcctgatctagaactattgtctacttaagaaaccacgttaaactgagaacccaaagtatttgtcaaagctacttctgcttcctgacaagtgaactgtttccacgtttccattcatgttcaggaattatggtgctcagtatgtccacttgtttacctgcacacatgaaggtcacacacccaaaatacctagttatcttttattgcacattcaccagtctcccagtccttaggactgtgattgaaaaggaagactgtgcaagcatacttccaaggagctgcaaatgatttatcatccaggctagttcttctgcttttgtttggatgcaaaccttttaagcttttacccagggaccttggcagctctgttttctgcagagtgccttccatacttgtcaggatcagtaacatcttttgtaatcctggagcagagacttcagccttcagagtagaaatggctacttacttgtcttctgaaaatagtttctctgacaccctcagaccagtgaacatagacctctttgtgtggtgcacttcataaagatggcccccagtggatgtattacatttatagcctctctgctgaccaactgcatgtgataataacagaggatatgtcttaacactctacagtttaaaagacatctttcatgtcatttgtcacaatgactcgcctaaattctacaaacaagtcatctcatgcattgtaacatctggcttgccagattcgtgaagaagtggacagagaacagccagttggcaccgttaagaactatcaaagccagtctttcctaattgattcacaatctcatccattcattctagtcctccaactttcacagctgcatttactttacatatagaataatttaataaccattattgatatatgctattaaatcacttaatatgtgtggttactgcgtgccatcatattgtatgtgaacatagaatggtgaacaagttaaaagtaagcccatttcgacactgttcaggtcagtatgtgtgcctctttggctgaaaagggaagcccatgtttcatggtccacaattctaaatgtaaacttgaagaagaaaggaagaggtgaggaggcttatagcaaaatcagctcgggctcaactttattgatcacatttgtaaacaccattgctctgtggcccctgttccagttttagtgtgtaggtccttgccggaacttcctccatggattgtaatctgtggaccaaatcatccctctactcttccaagttgcttttgatcctggcctttagcagcaacaaaaagcaagctagtgcagataatgttctcaaggggcttgcaggtggggatgcgttgttctgcagcaatagataacataatcaccttctcttatctaatcacagttagaacaaaacgaagcttaaggaaataaagggcttgtaaaagaagctccttcttctctgttagttttgagaagttggaggtggaaacgggaatatcagagtcactttctctaccctgctgaacaagtcagagactgcactgtgactgttcactgccaggactgcacaaccattatggctgactggcatgacccaatcccacaatttggatgtttgaaacaaatgggttttgctattgtggtttgaaggtgacttctttgaaaacaaaacctaaaacaaaaacaaaaaataaaacaaacaaacaaacaaacaaacaaaaccacagccctcaaatgttccccagggagaagcttttttgtgtttctcctgagggtaatcaattcagctgagagtccattcctttccagtgatcacggcgaggtaccgatgtgacattttcagttaaagctgcagggcctctcatcgcctgccaatattcttgacagctgttagctttgctgtagtcaaggcttgcttaaagagtggaatacttaaatgctgctttttctggcagtagtatgtgaaggagaagctaagcttgaaggggaagagggaagcaaacaacttattttagtgattactggacataagcgaagacatagtaaaataaataccatgagcttcagtgacaatagaggagaaggatagatgggtttttctaaacagcaatagttactatggttttctttgtcatggtagtgtgtgttctttgactctgagcccaaaagagccattgctaggctgtcaggagtactgtcgccagaagagtgactctctagtcaagaatgcaagcaatcagctgattcacacatatttgaaaaacaatatggaacaaaacatttcgaagtgcaaaacggagtgaggtataattgttaatttaaaaactctatgtgttcacaatatggtgttttgacttatgtgtgtacttcgaaatgtttatcacagtaaatccaataacataactatttcttgtcagagttatctttgatgtgtgagccaacgtgctctcttaacagtgtcccctagagctcaccatcaccagcatcagtcactgcgttacagcatatacctgaacaacctgctcgtcctgtgcaacagaagcccagggatgctctcaccagcatctctccactgttactacccatgaggctaggcaactctgatttcaaagtgcttgaatatgttttccttaggtgccacaggtaagtgagatcttatagttttagggtttttttttctttttttaattaggtattttcttcatttacatttccagtgctatcccaaaagtcccccctcccccccccactctcctacccacccactcccacttcttggccctggcattcccctgtactggggcatataaagtttgcacgaccaatgggcctctctttccactgatggccggctaggccatcttctgatacatatgcagctagagtcaagagctccggggtactggttagttcatattgttgttccacctatagggttgcagatccctttagctccttgggtactttctctacctcctccattgggggccctgtgatccatccagtagctgattgtgagcatccacttctgtgtttgctaggcccctgcatagtctcacagctatatcagggtcctttcagcaatatcttactagtgtatgcaatggtgtcagtgtttggaggctgattatggaatggatccctggatatggcagtctctagatggtccatccttttgtctcagctcaaactttgtctctgtaactcctttgttcccaattctaagaaggggcaaagtgtccacactttggtctttgttcttcttgagtttcatgtgtttctcaaattgtatcttatatcttgggtattctaagtttctggactaatatccacttatcagtgagtacatatcatatgagttcttttgtgattgggttaactcactcaggatgatgccctccaggtccatccatttgcctaggaatttcataaattcattctttttaatagctgagtagtactccattgtgtaaatgtaccacattttctgtatccattcctctgttgaggggcatctgggttctttccagcttctggcaattataaataaggctgttatgaacatagtggagcatgtatccttcttaccagttggaacatcttctggatatatgcccaggagaggtattgcgggatcctctggtagtactatgtccaattatctgaggaaccaccaaactgatttccagagtggttgtacaagcttggaatcccaccaacagtcttggaaagatcaggaattcaaggcccatacctaaatatgataaaagcaatctacagcaaaccaatagccaatatcaaagtaaatggtgagaagctggaagcattcccactaaaatcagggactagacaaggctgcccactttctccctacctattcaacattgtacttgatgtcctagccagagcaattagacaacaaaaggagatcaaggggatacaaattggaaaggaagaagtcaaaatatcactttttgcaggtgatatgatagtatatataagtgaccctaaaaattccaccagagaactcttaaacctgataaacagcttcagtgaagtagctggatataaaattaactcaaacaagtcaatggcctttctctacacaaaggataaacaggctgagaaagaaattaggaaaacaacacccttcacaatagtcacaaataatataaaataccttggtgtgactctaactaaggaagtgaaagatctgtatgataagaacttcaagtctctgaagaaagaaattaaaaaagatctcagaagatggaaagatctcccatgctcatggattggcaggatcaatatagtaaaaatggctatcttgccaaaaccaatctacagatttaatgcaatccccatcaaaattctaactcaattcttcaacgaattagaaagggcaatctgcaaattcatctggaataacaaaaaatcctaggatagcaaaaactcttctcaaggataacagaatctctggtggaatcaccatgcctgacctaaaactgtactacagagcaattgtgataaaaactgcatggtaccggtatatcgacagacaagtagaccaatggaatagaattgaacacccagaaattaacccatacacctctggtcacttgatcttttacaaaggagctaaaaccatccagtggaaaaaaagacagcattttcaacaaatgctgctggcacaactggcggttaacgtgtagaagaatgcgaattgatccattcctatctccttgtactaaggtcaaatctaagtggatcaaggaactccacataaaaccagagacagtgaaacttatagaggagaaagtggggaaaagcctcaaagatttttaaaaccagagacagtgaaacttatagaggagaaagtggggaaaagcctcaaagatttgggtacaggggaaattttcctgaatagaacagcaatggcttgtgctataagattgagaattgacaaatgggacctcataaaattgcaaagcttctgtaaggcaaaagatactgtcaataagacaaaaaggtcaccaacagattgggaaaggatctttacctatcccaaatcggataggggactaatatccaatatatataaagaattcaagaaggtggactccagaaaatcaaataacctcattaaaaagtggggctcagtgctaaacaaagaactctcacctgagaaataccaaatggctgagaagcacctgaaaaaatgttcagcatccttaatcatcagggaactgcaactcaaaacaaccctgagattccatctcacaccagtcagaatggctaagatctaaaattcaggtgacagcaattgctggcgaggatgtgggggaagaggaacactcctccattgttggtgggattgtaagcttgtacaaccactctggaaatcagttttagtttttaactatttggattatttcagttagcatcatgttatatgttgtcgcttatagagggattcctttttttctttcttaaagctgactgatactgcatttgtatatgtgtttaagtatttttatacaatttcctttatgcatttgtttatgaaaagttaaactgatacccaaggttggttattgagagtattgtgaacagatgaacgcggatgtcttttcggggtatagacttcattgtcttctgacgtgtcttctaaagtgaagtcactggattaaatgaacttggctttacctttagaggtatttcctctctttcccccataatggatgtcttgtttctgtgtatgcttttatattatagaagatagaatttccttttctctacagccttgaaaccactgatcttgtgtcttctttaatgctatccttactaataggcatgagatttctttatgattttaatttgcatttttagatgactggtagtattgaactttttttaatgttcttgttgggtaattccaggttttggtttgagaataggacattgaaacaattcacttttttttttaaagtgctggctattctcctgctatggagttgtttgagttccctatgtattctgaacataaacttatctgctgtagtctcccacaccaggtgtttttttcttcattgctatcaagatgcaaagttttagttttgtgaaacctcgtctgcctgttgtgcctttagttgtctgtacatagaccacccttgtggtaatgagccaactagattcttttccacagtgagcagaagggcaaggactctttgctgcaaaagaaagaaagggtgaagggtcgagggagaacttctttgacactaggaaatatttgaagaggaagaggaagagaacccctactgctatgcttgtgcttccagaatcatctgctctgtccaatcttgggttccgaagtctacccagcaggctttctctgagaccatagggtgggatgttatcaaaccaaaggagaaagcttttcaagatatagaagtagactggcttcacacattacacacatacacacacacacacacacacacacacacacacacacacacacacacacacactgctaggttttgctatagaagaatctggttgaaagcatatacatgcatatcaaaagctatcacggacctaagatgcttggatatatttccaactacattttcatgctgaaagttccatgatgctgcagtgttcctaagccaagcgtgaccacctctaattctaatctcaatgacttgtcctgacaagatggaaacagcactcagttcttcattcgtcatttccccaagcgtaatgagtactggctgcttgaaaggctccatgcagggtactttggaaaacaaagcaggcttatgtgatgtgagggaaatgaaaatccactaaaagcccctccatattttatgtcagtcccagattagaatgaggttgatttgggtagaatgaagtgcttgaccgaaacacaaagccactgtaaagaagtcttacactctgtggatggcagcagcagcgagctgaaataaccctgaagtaaattagagctactgaggacattacaattaaagccccccacccccacccccttcaacaccagcaactccagcattcaggaagcaagggtagcttagattgataggggttaccagtccctgggggtgagaggtcattcttgaaacatgacacattcagggctcagacaagtgatgactctctctcttcatactggcagaaagcctactaactttgttaagccaagaattacagtagtttcagcagtgcaaattacaagacctgactactgggatttagataaagcaagcttatttgaataatgtttcagaaaagaacatatgcagctattaaagattcacgatagaacaacggtaatcccagaagatgaagctactaggaaatattcatgcttacttcagctgcaagtctaccacttatgtggaataattaatacctctataaatataaatatccattccaggcaaagatattgaacctttgacctctttcaagtccagacttattagttattttaagagtgaagtcgttccaaactggccatctatctgtggagatacttccattaatcctgttagagatcagatttattacatgccagttacatgtgaaagatagcatttggaactgtatagtaaatgtatctggctaaaggcagattttagtctcggtgtctttacattaagtaaggaaggtgcaaaggtcttccattcccaaattgagagggaagtggttttggtttgagtccctgtgtatgttctcataggtaaacactcatttaaactggcatttcagaaatggatagaggtctaacagtgaacactagggagaggagtctccatgggaaaataagaaaagcagtgagggacaaagtcttgttgggaaaaaacaacttgctaatataataacaacggtgggcaatttaaaacagccagaggtcatctcaccctcaccgccatgcttcctagagagccccatgtctgtcagtgcccacattgtcttttatctcttgtgtcctgtctatcagtaagaggatatagttttctcatcgccactggtggaaagcagtaaggagtgctttactatgctcatgcaactgtcatatttaaaaatgtgatttctgttggcagtgtcttaagccctggaattaattggcactttagttggtatctgacaggaggaagagggtctatgagtgtaaacagaccatttagaattcctccaagtatgaagacacagggccagacagccaactctcccctcctgttcctttgagtcacagtgtatacaacagcttcatcttgaccttcaatacccaggagagggcaactgtcactgtgagggcattgtctgtacgtctggggtcagtcagcctacagctagctcactgtttgcagagggagtgcaggagctttctctgagacgatgtttcaggagtacctaccgagtccatgggaaagaattaattgttttaaaaatcagcacactccagactttcttattctagtcatctgagccctcagtcgttacaactcagcccactaaactaaattcttttttgctataaattatgttcatatcttgttcaatgttgaggaaagcctgatttcggatcatacaaactccagtgtaaatataggtatccatgtagatgttacccttttatgatatcaaggtgaactttttaattatctctaacataagcaatcaccttgttatttctgaaaggcttttaatcatgaaaatcagaatcatctagaaaaatgttaaaatattcaaaggctgcactgggtcattttcaccagaacctggggtgtgtgtgtgtgtgtgtgtgtgtgtgtgtgtgtgtgtgtgtgagatgcaggcatctgacttcttaaaggctctgcaggtaattccattgtataaactgaaacctagcttggtatcagataaaatatgcgtgtgtctaagtgtcatgttctcattagttcttgaccaacacattttcatttataaatagtttttgaggactgaccttcataaatttaaagcaggataattatttttgtgatgtatctctgttagaatgtgatacatgttgtatataaactgtctggagattgtggtgttatttgcaaacatgccagggaattttacaaaggtttatgtaaacagtatgcttcaattttgtaagtagaaaaacaacctcaaaattagcctcctattacagaaaaaccccagacataggagaaggaaagggcagaattcgttcccacatgttgacaggcccccatttccaaaatctgtgacagccttcctcggctgtatcttctcttaacaaattgtttatatgtcaagatctgtccattccttcaatttctttccatgccgtcattattcattaagctggccaggggcgtgaattaggttcttgtaagcatttgtacttctgggctcaggcagcccacagtgagctctgtgtctgcagagggaaagggggctttcctatttgttgatttgtttatttatttatctatccatccatttatttgttcgtgtatctatttatttatcctatataattgtcatgcactttctatagaaatacattttagatgtagcttctggccaggtctcaaggctttagtttgcttagcctgaatggttctccactgaacacaaaaacaatcacaagaaagcaaacatccaaggcgttcaaatggtccatgctgtggacccaatcttcttcccccaaatccttctcctctgtgtacgatactgtgaaactgatggagatgctgagcagtccccacaaaaggataactctgtgttgtcaggattctagatgttgctgctgtttgtgtagatgtttaaatcctatcgagtatgaactgctcaaatgtaatgtttccacaaagccttgaactccaaagctggaagcagtgttttcctaccgtgatcccttgatctttattaggattccttcttcttcttttttttttttaattaaaaaaaatgttagtttagcttagttcagcttttgctttgtttttagaatatttgcataatttccaccacttcctctctccatccatctctttccatccccttccactctcactcaaatacatgaccttgtctttaattattattattaaatattattattacattatctgtgtttagtactgacctctgggaattggatatcccaccagggatctaatttcggaaaaacaaaatcaaaaccaaaaatcacctgcttctttttctcccaggaaccactaattcccagtagttcttcattttgagggtgggatcatttgacctttcaccatctatacccgtgtatccacgggttttgtcatcacataggccttgtttaggaatctacattattgaagattccatgagtataacttgcctgtaatatcaagaatcacatcctagaaacaaataacatgttctttaggctcttacagcctatatatatatatatatacacatatatatacacatactaggtattttctttattaccccctttcctggtttcccctccgaaaaccccctatcctttcccccctccccctgctccccaacccacccactcccacttcctggccctggcattcccctacactggggcatagagccttcacaggaccaaggacctctcctcccattgatgaccaactaggccatcctctgctccatgtgcagctggagccatgagtcccaccatgtgtattctttggttggtggtttagtccttggaagctctggggatactggctagttcatattgttgctcctcctatggggctgcaaaccctttcacctctttgggtcctttctctagctccttcattggggaccctgtgctctatccaatgtatggctctgagcatccacttctgtatttgtcaggcagtggcagagcctctcaggagagagctatatcaggctcctgtcagcaatcacttgttggcatccacaatagtgtctgggtttggtgattgtatatgggatggatccccaggtgaggcagtctctggatggtcattccttcagtctctgctccacactttgtctctgtaactccttccatgggtattttgttccccctctgagaaggatcgaaatctccacactttggtcttccttcttcttgagtttcatgtggtttgtgaattgtattttggctcttacagtcttttcacttcctcttccaccatgttcctgaatccataggtgcagaagttatgtattatctagtgttatatctgtaggtgtaccatctaatgttgtaaatcccatagtcagtttttttccgcattttaaatagttgcagatttctctaatgctctccaatcttctgtaaaagcaagtttatttggtgaagggatgagaaccacagttatatgtgagtatatgattaagtatttagaaaacagttgattgatgaaaatggcagcaatagattctactctcagatcttggacctcttcagacatgagcaattggttaggtttaatattagcaggcctgaagtccattctattaagtgggtcttttaattccaattcagcaactgttggtttcccataaaacaaagttgccaatattgtactattgtagaagtcttgctgggtcagtcattgctgtggttcatgggttttagatcttgaatgctttcctcccttggtcactgatataatgccaataccatgaaagcaactcctcagggaggagagttgcaggtcagttctaggtcaatttctttaagtcccgagtccaaagtgtgtggtatcttcagcaatagggtcttacctttcagtttgggagggcaactaaggaaaatggcaatagtctgggaagtctcttggatccctttgaacaataactgaagggaaatttcctatgtctggcactgtagttttgttagatagtctgactcctggggaatagtatcactgcaggttgtataacttcatttaaaattatataaatatatggatatataatgtattttaggtaaacttataaaatcccatttttctatagttttttcaaatatatacattattacttactgtgatcacttctataatattcctcaaaaatctactatccttgctgagtctctagccacttactgcacaatggtaacaataatacatggataaaaattatacttgtgatgagtaagaccactgaagaaaagtttccatgccctgtctctgtctctctctctctgtctctctctgtctctgtctctctctgtctctctctctctgtgtctctgtctctctctctctgtctctctctctctctctctctctctgtctctgtctctctctctctctctctctctctctctgtctctgtctctctctctctctctctctctctctcttctggccttttatgtgtgcttcactataatattataatttccttatattcatgacactatagatgatgaatttctgctgtctacatgctttctagggaaaagctttacacatagaagtgctcaataaatatagaagttttgcatgaagagacttcaaagccatgatctattcaacaagatataaccatggcttaggagagaagctgtagattataagcccagttatttgtatggagaattttttatatttcactatgatacaattattacagtttatatgtttgttggactgattattgttattgctgtcatttactctgtatttaagaaacaactctttaaggacatcattatctttatcagaaataaaatcaattaaggtaaactgatgtagatgacacagcttctaagtgttattcagggactaaattaagtcctaaccagtttgaaagcatatatatttccaatttactgggattggttagattgtgcctacatgcaatgtctagactgaaatgatggctgtcattgcaaataacaagtcagtgttagtggcttctccccctcttcttcctcctcctcttcttcctccccctcatccttctcctctgcctcctcctcctctttcctgcaatatttaaactagttccacaaaatggtgagtggtaaaccaggcaatacatcaaaaagaaggaattcggggatggggagagatggctcagtggttaagagcattgactgctcttccaaggtcctgagttcaaatcccagcaaccacatggtggctcacaaccatttgtaatgggatttgacggactcttctggtgtgtctcaagacagctatgatgtacttacatataataaataaataaataaataaataaataaataaataaaatcttaaaaaaaaaagaaggaattctaaggtgaccaggattcttgttgtaaatgcaggaatgaaggcaatatgcaagctctggtagggttccatctgtactattctcagactcagtgaacagagaacagaaagcatgctgtagctgctactgggagacttgggagacactcactatggagatcagcgtgaatttctcttcctgtggtctatctcagaatattttctatgctttcctatttttcctgttaaactttttttaatatggcatactaattattattttctgccctatatactctcagaatctcccaagaatactgctttggcccacctgtttctatcactgctattcagagagcagaggccctgccactgagtcaggccattcatctttccttatcccttaaggaggtaaagcatgttctctttgatgatctttactttgggacgtattaattctagactctttaatgtgtgctgaagatacaagagtcagttttcattaaaaccgatgtctaaaagaaagactctagggggaaagagaccagacacacacacacactcctctgcctgtgtttgtaacgcttctccagccttctatgacataaatgaccacattacctttaaataaagtattctcatatgtctaaaatgagcttatctgggttctctttcttagagtcaaataatcacttaatcatgagagttaactaatttttaagtcattcttgaaattcagccttaatttgctttttctcaagctgagcccacattacttaactgttcattaagacttactatctacctcaagggtatatttcatattccttaatgtctctttatatcataattggttatttatggggtttcttgatgattttctgtatttattatttgaaattataatataattacaatttctccctttcctctattcccttaaattcctcccatgcaccttttgttcctttaaattcaaggcctatttgtctttcaggttgttacacacacacacacacacacacacacacacacacacacacacgcacacacttttaaatatgcaactagagcctgtcgctttccagtttgtataatcttatctgtatgtaatgtttggctgaatggcaagctcatctcatccgatctttcaactgtgcattgacatcacaaggcatctcttttatggttgatggatccaatttgcccctctctttatccgtttcaccttcttttttttcccttttctttcaacattatgatttgaggaagcaaaacccaggtacaaggtcacagaatcaacaatgatggaacattcttagcccaactcactaaatatactcaacccatgtcatttaactgcaattggaaattactcttaattggaatgaaatgggaagaatatattcttgttctttccctcaattctacaatttgatgctcttgtctgttttttggaaaaattgccaatcatacacaattttcaaacttatctgccagtgggtttgtttttaaagcatttatagtcttagagcttggtaagaatacacactttgattaaagaagacaaattctgttttacaataaattaagtgttgtaacagatcattgattcttatattaacttaattacaaagccaaaataacaatacaaattaaatagatgaagtcatgttgtttggaaatattagaaaatagttgacataataaaataagttattcaattgaatcatcaaataattgataattaagaaagttagaaagaaagttttttaaaggctggagaaaagcattattccataagcatagttaatatatatatacatatacatatatgtatacatatacgtatatgctgggactggggagttggctcaatggttaacgcatttgctgctcttacagaggatctgagttcccagcccccacatgacagccctcagctcccagttccaagggatctcatgccctcttctgatcgccaagagcactcgctgtatgtgtagtgaacagataaaaacagtaataaacacaagataaaaagaactattttaaatacacacaacatatatttttgtagatagagctaaggcacgtggagtagtgatgctcccatccaaagtcataggttatctgacaaaaatccccagcatcgagcttgggaagtatcctttcgggttgttggtcagaggagcccaagagattcccaaagcaatataggttattgccatatttctaaatttcctatttgtttataactagtggaggagtcttcccaattagttcagaattaaacacatacattctttctggaacaagcacagaaatgaatgtccatacacaacgagtgaatataaacagaggaaaacctgaaagataatttgtaaccacaaagaactaatttagacaaactttgtctaggatgatatttgcaaaacctaacttttgtaaataaaatagatacatacttcaataacttcttttaatcattggacaggacacccgattttttgttttccatttcctttcttgagactacataaaaatgggagaaaaattaataatgttcaacaaacaggctatcaccagtgaaagatttaatttaatttctggaaaatggaacgtgaacaagtactataagcagagcacaagcaaacaacacagaggatgagcgatgggagagcttcatgaaaggaagtgtgcccagtgccatggcaggacctaagccaggttctatttggatatgacaacactgatgagccctgaacgtagaaacacaagcagaatcagaattcgagccaaggctacatatatcaggatcttgctatccaacaaatcaaattaaatcatcaaagcttcacacatcatttgtttaggccattactctgtgtggttggccgtttgggctgggtttcctagacttgtcatggactgtcacccaactgcttatcactgagctctgcacccacgggttaatgctttgtcaagtaggatgacaaacaaccaggcctcatcaatctcatcactgaacagtttattctgggcttgttcatattggttgaacgagactacagccgtaagacttctgatggcctatgcttagaatcatcatgctttaactactttcttcattttctggcagagatagggggtaagaaatatctagattcaagggtgcagcaatttaatctccataagtgactgagtgcagttaaggagttgcacaggagctggataaatcataactgtattttttaagcctaacagtatatttgtattcactttatcttgctccacatcagatctctctactcaaccccatatcagaatgtctagctggcttgcataccggaaatatctggcttgcatgcagagagtgtctggcttgcatccagatttgttgctaggcccaggaacgcccaaaggaaacagggcttattccctgaaggcactgtaactctgaactgcccattaggtccctggagggtggtttagcagagtaaggttgtgatggctggctttcctccaggaatctcaaaaagtactcaactaattagcaagtcatgtccactcgccctgacctacaaatcataatttccatagattattcaaaaatatttttatgtaataaagtaaaaacagatatttgaagaagcttgcaacctgaattagaaatattacaatgatcaaatggaaaattgcttcagaggaaataaagatggcttaggagattcagacataataatacccttggaaagatccaataagccataaaccttaaaattaaacaaaaaaattaaaaagatgctatgcaaaattacacagtatgactgggctctttaaaaattcataaattctcatcaatatgattgcctaaacatgctctgaacaagagtagcaccagcagacatgccaaagaggacaggggaaagcactcgcagcctcagctatacacaaagagctacaggcaaccaagaaatgcagatgggaccgggccaaatacatcacacagggacgatgacgccaatgggttgtccagtaccaaatgaccagccctgagaacatatacaaacaagtaacattatatgaactgagcagattatatttagaaatgtataatacatgtacaaatatagtcatataatatataagaataaaataatttgtagaatatattgtgtatatataaatattatatatatgtaaaatatgtaagtatatatgtacaaatagccatgtaatgactattaacaaataaagagctcatgtatttggaagagagtaatgaaaggctatgggtgggtttggaagaaggaaagggaaaagagaaatgatgtgattatatgagaaaaatgaaataaaaatgagtacgaagaaaaattcagatttatagagttcaagtgaaaaacagtaatgaggcaatttcaaaacaagagaagaaagataaagaaatggaaactatatgtgagtagattgcatgtatttagggatattccttaaaagagcattatcaacagattagggctgaggatttttgggaaaatttgaggttctaaactgatgctaaaatatgcccttttgttagttataacatacagatgtggagaaagtcatcttcacctatagcattctgcgggaaacagtggtcacatgacgctcagagtgaaaaccctgtttataggtcccagagtgtagaaggagaaaacagactcaattttagagtgagcatgtagaattcttaattatggatcagtagctgactgctgtcaaacataataatgttaaagccatcatactgggactagacaaagcagatctttttcttctctgcagcctaaagggagttcaggaggacaggtaatcagctgtaaagcaagacttctcaaacttggtgtacttgaaaaccttcttagcttaaccaatttttgtatgaccgtgagcatgtttgtctataaaataggagagcaaatagaatatttatcaaaaatacatcagaaattttttattttaaaataattccttggaaaggtatcattttatcctttgtgaaagaacgcatacatttgtgtactaatgaaatagatgttctctttctatataaagacatcttggaggaatgtttgctgttacaggcatagagacgctgtgagggctttcaaagttgactgatgcttttattttatcattatcagcgctgagaacaacattttactatgctgtataaaatggcaggaatatgtttagggtcgtttcaaaagtgattggagattttgccctatttccaagtaaaatttcacttgattttcaaaatggagctcaggatagcatttcaaacagcaattcttaaaaatcaaacattcagcacaatataactaaagatgtgcatactgaggaatggtggttaagaaaacattaaaaacctcattttttaaaaaatgagattaatccaggatattgtctgaagaatggagccgcagtgttttggaaagcactgactggcactgcatggcctggaggcaggtagttgcacatacatgttcaggagaaaagctacactgaggagctgtgccatcacatggcttcagatcattatgtgcttgatctccaattcctttttcgtggctgttttttttttttttttccggaagtacaatttgccaattatttttgacttgtgctcagtttagagctagggttgagggcttaagagattgaccctgctgttgacagcatttaacggtggtgctcttacagaggacatgagttcagttcccagcatccatctcaggaagctcacaaccagtgccctctctcttcaatggatacctgcattcaaacacacacacacacacacacacacacagacacacacacacaccctaccccaccacacatgtgggtaatccttttattttgcgcgcgccctgacttgccagcaagtacgacgctgcaacaggatccttctgcacacgtttattgggagagcttgattgcagaggtgaagagaccccaagcccagaactggtgctgcttatataggcctaggagaggcatgtctcacacccggattggttatgcatgggttatgcttaccacctcatttgcatgtctcacatctgattggttaacttgtctctcatctgattggttaacttgtctctcatctgattggttaacttgtctctcatctgattggttaactctcaaaacctcatcttggcaaaaactttactgcctatgtatgtgtggtggccagcggtagccagcaccaccctgcaacggcacatgtggcttcccacacttttaatttaaaaggaagcttatatatatgagttcaattggtgggcgattgcagaaaaagtcagtagttcctgacattctctcattaatacaaagtccacccagaacggcaagtgaaagggtggttacaggctacccctctaaggctgtctcctttataaacgagactgtcaaggaaatgtctcctctacttgtttatgaaacgtgacatgcagaatcatgccgtctgtgaacttgcctggtgtgttccagtaactgttgtcatcagagtgctctttgacacctaacctttccccttcgggctcttcttcatctggaacactttttggctctctacacattttttagttttttcttttcttctcatttccctatccaaagacttaacaaagttttcattaggcttctgtgattcccatagccctttctataaagatcctaccacatctttgccacacagtcatctgagctcttgatgttgttatctataaacacattttgatgaatttcatagcattctaggcaaagagtactatgtgctttaaaaatccagagttttttttcttttgcactttaagagaactactgcatttcattattatttaaatcattgtaacaacaattatggcagctttagcttgcttttcattgagaagtcaaagacataaaaaaaaaactttctagcaaaagtgtgtttcatctataattagcagcaaagatgtatactgttcatagtaaacaaagtaaaacaaacaaacaaacaaacaaaaaaccccactgtatttgtatttggacaccttcaaatttaatgaagtgcttaccaccaaattaattgtcctttgactttgaatattctttgtgtatcactaaaatatggtttactagtgaatcaatgaaagctgaaagatggtcactgctgtgacataatcctgcccatctgggttacttcgaagtcacagcttcagtgtataacttagtgtaattaatataaaatgctgggccatttaaagccccaaatcccagtagctaaacctttgaagtttgtctcatttatgcaaagtcagttgatatttctggttgacctaataccttctacttggtcattcagacacatggctttcttcttagtctggtttaatttctcaatgtcaggtgtatctcccaccagtgaactgaacaactgaagatgtctccatgagcaggcccaagggtggcatatattctttccatcctccttacacatggtatgagatactttagaaatgtgttctagctgtgaacccaaggaaagaaacatttttttctgactttcagatcctctatacttaagatcagctaacacagtgccatattcaagttagtttcttttaataatatttaataaatgtatgttgcagcctcatagaaattataatatgtgatgtttcttttgaatcatattannnnnnnnnnnnnnnnnnnnnnnnnnnnnnnnnnnnnnnnnnnnnnnnnnnnnnnnnnnnnnnnnnnnnnnnnnnnnnnnnnnnnnnnnnnnnnnnnnnnnnnnnnnnnnnnnnnnnnnnnnnnnnnnnnnnnnnnnnnnnnnnnnnnnnnnnnnnnnnnnnnnnnnnnnnnnnnnnnnnnnnnnnnnnnnnnnnnnnnnnnnnnnnnnnnnnnnnnnnnnnnnnnnnnnnnnnnnnnnnnnnnnnnnnnnnnnnnnnnnnnnnnnnnnnnnnnnnnnnnnnnnnnnnnnnnnnnnnnnnnnnnnnnnnnnnnnnnnnnnnnnnnnnnnnnnnnnnnnnnnnnnnnnnnnnnnnnnnnnnnnnnnnnnnnnnnnnnnnnnnnnnnnnnnnnnnnnnnnnnnnnnnnnnnnnnnnnnnnnnnnnnnnnnnnnnnnnnnnnnnnnnnnnnnnnnnnnnnnnnnnnnnnnnnnnnnnnnnnnnnnnnnnnnnnnnnnnnnnnnnnnnnnnnnnnnnnnnnnnnnnnnnnnnnnnnnnnnnnnnnnnnnnnnnnnnnnnnnnnnnnnnnnnnnnnnnnnnnnnnnnnnnnnnnnnnnnnnnnnnnnnnnnnnnnnnnnnnnnnnnnnnnnnnnnnnnnnnnnnnnnnnnnnnnnnnnnnnnnnnnnnnnnnnnnnnnnnnnnnnnnnnnnnnnnnnnnnnnnnnnnnnnnnnnnnnnnnnnnnnnnnnnnnnnnnnnnnnnnnnnnnnnnnnnnnnnnnnnnnnnnnnnnnnnnnnnnnnnnnnnnnnnnnnnnnnnnnnnnnnnnnnnnnnnnnnnnnnnnnnnnnnnnnnnnnnnnnnnnnnnnnnnnnnnnnnnnnnnnnnnnnnnnnnnnnnnnnnnnnnnnnnnnnnnnnnnnnnnnnnnnnnnnnnnnnnnnnnnnnnnnnnnnnnnnnnnnnnnnnnnnnnnnnnnnnnnnnnnnnnnnnnnnnnnnnnnnnnnnnnnnnnnnnnnnnnnnnnnnnnnnnnnntctaaataaaggtcaagggcgcatcctcttcagtggtattgatgattgcagactcacaggtgagaaagaagggcatagaaggcttctgtgacaacccctctccccagaaaggtaacaacctagacaggagggtgtgaaggagaactttgataagaatgctgagatggagctctttgcaatgacttccagaaggagtagagctggggaaggacttacttttctttaaggggctgggcactgggtttgaccctgctgaaaaaaatattgggagtttttatcaaatcttttttttttttgggaggttcagggctaggagaacttggaagtaagggtgattgaggcgcattatatgaaacccttcaaataatcaataaaaatattatgttaaaaaggaaagaccagtctaattgaggtgaagtcctctgaaagtgtgtcctcaggatcagcctatagaagctctgttccagaagtggtcagggctgcaccgtgggctggcagccaaacttgggagtgttaagaattacccaggtgatactcattttgaaggcatgaaggagtcctggagagcagtcgaggcttggcactgtgagaggccagggaaggccattgctgcatatttagtagcagttggaggctcagcattgaagggaccatgcagagaatttgaagcttagcaccaggaagagagtccaggagaggatattggtgaaagtgcagtccagttgcagtgaagaccccagcactttggagatgctagtattatgggatggccaccaagaacagtagcaggaacggagaggatcctgcctgagcttgaaagacaagctgtgtgtgctgcagagggcagagctggagaaggtgaagaggttagttttggtttgttcggattatggctgccctggttcgttcttcttgaaagaaatctctctctcaatctctctctctctctctctcatttatagaatctttaaaagaggtggctatttttaaggggatatcttttaaagttgaaatttatttttatttttttattttttaattacatattttctttattgacatttcaaatgctatcccgaatgttccctacacccttcccccgacccttcctccctacccacccactcccacctcttggccctggcgttcccctgtactgggacatgtaaagtttgcaagaccaaggcctctcttcccaatgatggcaaagtaggccatcttctgctacatatgcagctagagacacagacaggtagatcaatggcatagaattgannnnnnnnnnnnnnnnnnnnnnnnnttcttatctcctgtacaaagctcaagtctaagtggatcaaagacctccacataaaaccagagacactgaaattaatagaggagaaagtggggaaaagccttgaagatatgggcacaaaagttgaaatttataaggctgtgggacttttgtgccctgaatccatgggaaacccagatgagcccaagaattgtgaagtgcactgtaactcacaaaagcaggacttaagattgtagaatgttttctatggtatgatcttgaggatgagcaaggtagaaaatgttatggtttaatagtgatgtgtttatatgtcaagttgacaaggggccagttatgctggctagttttgtgttaccttgacattagctagagtcgctggagagaaggaggactcactgagcaaaaacctccatgagatctggctgttgtgatgctataggacattttcttaattagtgattgataggaagggcccagtccattatcagtggaactacacctgggctgatgaacaagttagttagcagcactcttccatagcttctacatccactcttacctccaggttcttgctgcgtttgctttcaagttccaacttccttcagtgataagcagtgatatggaagtataagttaaacacaccctttcctccccaagttgccttggtcatggtatttcctcacagcaataataaccataactaagacaccagtactacctctttcctgaccacagatgctcactgccttggttcattttggggaattctcttcttgtcctcatcctcttcgttctccacattgtaccattaaaaaaaaatgtcaaaagagaagtctttcctcatctcttgccacttaacccaatcctaaaatacaccagagagatggctcagcagttaagtctgcaggctgcttttgcagaagaccccaaatttcattcccagcaccatactgggtggttcacactcacctgtatgcccaacaggaaatcttgcactatattctaggccttgtaggcactgcactcacatgcccaaacctgaacacatatagctattaattaaaaaaaatttaaatacatatataaactattaggttctcattgttcttaaaaatattgagaccccattagtctggttgaccacagaaggtataatgagaagaagaatattcccttttgcctcctttctggttagcttgaagcctctgcccttctgcccactcagaaatcgtgcacactggctttgcactccatacgttgtgggttttgctcatgctccattttcttctgcacagttgatccctcctcatctttcccatctaccataatttagatgtctttaaatcctttccgaaccaaaggcagctgttgtcactgttgtgtcagtctcagtgtcttctacgctgtaattgccacatgtcttgatcatattttgtgattcaatggttaatatctccgaatcatcaaactgtgccctcagtttatcattttgtcacaaatgcccaggagaatgatgggagtgtcaccatatcctacaagtatccctgtttgtcatagtttctccactttgaatcccaagctatgccttactactttgcacagattgaggctaaacaaatgcacatcaaatagaattggagtctaatagcctggattcaaataacagttttgaagacatacttcatctaactgtcttaatgcccatnnnnnnnnnnnnnnnnnnnnacccacccactcccacctcttggccctggcgttcccctgtactgggacatgtaaagtttgcaagaccaaggcctctcttcccaatgatggcaaagtaggccatcttctgctacatatgcagctagagacacagacaggtagatcaatggaatagaattgaagacccagaaatgaatccacacacctatggtcacttgatctttgacaagggagctaaaaccatccagtgggaaaaaaaaagacagcattttcaacaactggtggtggcacaactgatggttatcatgtagaagaatgcaaattgatccattcttatctcctgtacaaagctcaagtctaagtggatcaaagacctccacataaaaccagagacactgaaattaatagaagagaaagtagggaaaagcctcgaagatatgggcacaaaagttgaaatttataaggctgtgggacttttgtgccctgaatccatgggaaacccagatgagcccaagaattgtgaagtgcactgtaactcacaaaagcaggacttaagattgtagaatgttttctatggtatgatcttgaggatgagcaaggtagaaaatgttatggtttaatagtgatgtgtttatatgtcaagttgacaaggggccagttatgctagctagttttgtgttaccttgacattagctagagtcgctggagagaaggaggactcactgagcaaaaacctccatgagatctagctgttgtgatgctataggacattttcttaattagtgattgataggaagggcccagtccgttctcagtggaactacacctgggctgatgagcaagttagttagcagcactcttccatagcctctacctccaggttcttaaaaatattgagaccccattagtctggttgaccacagaaggtataatgagaagaagaatattcccttttgcctcctttctggttagcttgaagcctctgcccttctgccccctcagaaatcgtgcacactggctttgcactccatacgttgtgggttttgctcatgctccattttcttctgcacagttgatccctcctcatctttcccatctaccataatttagatgtctttaaatcctttccgaaccaaaggcagctgttgtcactgttgtgtcagtctcagtgtcttctacgctgtaattgccacatgtcttgatcatattttgtgattcaatggttaatatctccgaatcatcaaactgtgccctcagtttatcattttgtcacaaatgcccaggagaatgatgggagtgtcaccatatcctacaagtatccctgtttgtcatagtttctccactttgaatcccaagctatgccttactactttgcacagattgaggctaaacaaatgcacatcaaatagaattggagtctaatagcctggattcaaataacagttttgaagacatacttcatctaactgtcttaatgcccatcacagtttgagttttaaacaaaatgcaggtgtaccattttgcttcagagaaacttctgaggtttttctttaaagggggggggagggtttactgatagattaacatggtttggaagcaatcaagttgatttacaccccttccatttcatttgccatctgcctgtttctaaatgagtagaagtttggtacaagcaaaaataaatactccaataaaatgtttataccataattctatgtaaattatagcttttactttgagcaagaattattacagactagaagtaaaatatttcctgcttggtagttagcgagctgtctctggcatctgcaacttgtgttactgacctcaggctcaaaattttcttctttcttttcagtagctcaagtttgaaaccatcaactttttatagcaaaccccatgatgtctgtgtagtctgacagatgtattcaatatttgagtcaaatgttgaataagtacaactttggttgtgtgtgatgctttattaatgtgggcagctaatcttctgaagctaatgggagtaaaattataatcaaaggcctttttaactcaaaagaacatgctttaaattattcttttttcttaaactgttgcttttctttgactagggtccttgagatagtgaaaggctttttttcccccttagctcaaaatagcagaaagcatagtctttattttcttacttaagagaatggtttttgacattcaattcttaacactttgcctgaaataagattctgtgtctcacttgggttttggcagcaaagcttagttatgcatttaagagaattaaaatagatgatccattaacacagcaagtatacttttatttgcactatgtgtcccaaactgggactatcagtcaaaaaaatgtctaccctctacatacatggttattatgttttggatatcctgagggaacaggtcaagtatgaaacctactgagaagttgaaaccacatttcctacaatgtgggaaaactcggacgggggtggtcagagtggaactaaacagaaatgtacttaaagataaagctagaactctgctcgatcacataagagtacaatggagtattaatgagactgcaaaattgcccttctggagaaaggtctgagttctgtatccccaaataagtaaattgttgttgacagaataggaggaaaggggtagaccttgtaaacatcttaggaggaaagttccccttggatctcctatagtagtggtccagggttggagttagatgctgcttaacaatttataacgtccaaaagacaaagtacttcccaactaagaggagactgaacagagaatcagcagcatttactacaaaagacagatgctccattcctgcgagaaggtgatgatggtgtggatcaaggagacatctgtgcttacaataagatccagtgtggccatgtttagacttaactgatgtaaagctgcaagaaagtgagaagacagtgatggtgatgtgaattctagtcaaagaaactgtatttctggtctaagaaagcagagtttctacttaagtaatatagagattggaggtggtatccactttctatatctaatttactacaggcaatgagacatggccaagtaatccttggtttggtccacaattctaattgctttcattgatggttttaatgctaagtatttagtgcagataaatagaagccaatacaatgctttgatttgggtgatgggaataggaaatgaaggatactgagaaagagcaactggtgttgtagaaagacaacctaaagtgagaatagtaaagtcagggtattagcagtcagagtttagaaaacaaaaggtgagatgggcatggtggcatgtgcctttaaggctagcattagggatggcagaggtaggcagacctctttgagttcaaggtcagcttggtctatatataagaagttccaagacatctagggctacataatgaaacccagccctccaaagtcgacatggaggaagcagtggaagaaagggaagaagaagaggaaaagagagaaggggaggagagaggggagaagaaacaaggagatgggagagagaagaggagtggttcattctgagtgctgctcatgaactgtgtgggaattcgtggatttggcatggagaaggttctgtatgaccatagacccattgcagtgaagtactggccagggcaaagcatagacagagtagacttagggatgaatggtggcaggcaggaagggaagagtgtgaactttggtactctttctgaggatttttttcctcccaagtatttatacaaagaaattacatgggtggttattgtccttaagtgggaaatgacatagaaggttgttgtatagatgtgaaggtcgagctcagaataattcaggagtggggacagtaatagcagccattgttgagaaggtgcaggttgaggatggggaggcgcaggggggagttttgtaaatgtgaaggaatctcaggggagaatcgttttctttctttttttttatatttataatattcttttctccttttttctttttgtttaattaggtattttcctcatttacatttccaatgctgtcccaaaagtcccccatacccctctactcccctacccacccacccccacttcttggccctggtgttcccctgtactgaggcggtcttgcaaactttatatgcctcagtacaggggagatcattttctattccactagatgatttcaaaggaaaaactagattatcaagcaaaggtgagcattgggaggatgctgctcaaactctggagagatgaaacaccatctccaagtcagtagaagccaactagaaaacatgtgataattctggactgctctgggagccagaaggttctgacataagggcccaaacacatggaaagtttaggttgggctaagtactacatcaaaatttacaaaacaggagaaaccagatgcttaattttctgtatacatgacattaagtatacataattgttgaaataaaactaaaacatttaacatgtgttacactgttttaaaatatgaactaaggagatccaataatttcattgtatgattaaataccatgttcaaaatattgatgaatatcctgccagcatcgtgggaattttacaatatgagcactttcatggcaagatgcagtgatctttttttttttcccctttgagacagtctcttgtatctcaggctggccttgaacttgctctatagctgaagacgaccatgaatttttgatccttctgcctccacttccttagtgctgtgattataagtattcactaccacattaactttatgtggtactaggatgggacctgtgactatgttcataccaggcaagcactttatcaattgaatcatcccacagccctttggtggtaaagggctatttgagattatttgagagctctgtgtatatgtgtgtatgtgtgaggtgtgtgtgtgtgtgtgtgtgtgtgtgtgtgtgtgtgtgtgtacatacatgcacatgcatgcatgttttgtgtgtacgtgtgtgcctgcatgtgtttatgtcggtgtgcatgtttgcattcatgcgtgtgtgtgtgtgtgtgcatgtgtgtgtgtgtgtgtgtgtgtgtgtgtgtgtgtgtgtgtgtgtgcatgtatagtattggagttcaaatccaaggctttgaatatataagaaaaaatgctccactgaggaatgcccataatctacttaaatcctttaattattgaaaactaaaaacattatcatagatagatagttcagtttatttgaaaagttacagagctttatttagtggacaaatcaaaatgcttctagaagggcatcacaggacagttgagtagatatgaatgcaatggaaagcaagctttgctttctgctctcacccatatttacctaagagaaaaggataaacaaaaatgtttctacagtcacagttcactgagcatagtttgacaggaaggcggttctgcacattataaattctctcaaggtgacaccttccttgagaacacaactccctatgttgtgaggctttggaagtgtcagtaattacaatgatcctccacatgctagcctatgtgtatcaatgttgttttctgcttgaaaatcgtatctttatagattgttttatatttgagtgttttagttatcagttaacttttgagcccactcaacaagatagttcctaactctgttttggtttttgtttgttggttggttggttttgttctgggtttggttggttggttggttggtttttgaaacagggtttgtctgtgtagccctggctgtcctggaacttgctctctgcagagaataacctcagctcagagatccacctgcttctggctcccaagtgctgggataaaaggcatgtgccaccactgctggcagtcctgaaacccttaaagcctagtttgtaggtctgtctcaaattctctgtgtcacatcttctatcttgcatcttttatgtaattatgttttatgataagatcataaaatcccatggcctttgttctcccttacatgttgacacccttatacctttttcatataattaaagacaatgtctgtccaagttacagaattttatttacatattatatatgttaaatatgaacctaacttaaggatcaattttattaatttttctacccataccttatgtgtttctaaacaatacatatatctattatgcgttaggcattctcttaggtgctttgtgatactagctcattaatttctcccaaacaaacttgtaaggtaagcatctttattaaataaagaatctgaggcaggaggatttaaatacttgttcacagtcaaggacagtcttttgtcaaacttcttgcaatccagcctggcagctcagcaggcaaaggctgctggagcagttagaatatggacatttatatgaaccagagggcagctcttgacatctagggcgagaagtgaggattcccgagaggaggatacagaaataatcaagatggtgatgaatgaggtgacaagtgacgatggatggcctgtcatagcaccaatgtcttgcaaaaatctataaaccaaatcccagggcaatagagtggggtgttttgttcagactttagtaattaactgagtcctctaaaagagtacaaagatgataaagtataagtctatagttatagttaatgattaagtatacacttagaacctgttgacattgtagtttctgaaatggtatggtaaagataaaaaagtgaggctctcaaatgaaggatagcattcacagagttgttaaggactggctgactttgtaattgaattagtgacctggcaagtctctagaatctaaagatcctgtaagggaaatgaagagctagtaggacttgtatgaaaaaaaaaaaaagagttgactctattttgtcctatattttgaccatgtttctcctcccccaaactcctataagatcctacacacacacacacacacacacaccccaaaaacagacaaacataatgaaaatcaaagcaaacaaataacaacaaaatgaggcaaaaacaatgtgccaataggagtgaccagggggaagccaaaacaaaacagaaatcctacaaagaaacaaagaaagaaagatggaatttgttttctgttgaccaattcctggctgaggccctgtcttgggttgtgtttggcattcttagtgacacttcataggagaaaactcttcgccagctttatcactcttgggcatatggtaaagaatctaatttttaatggtttatgaatagaaaaacaacgaatagtgttgtttgactgtaaccactccttcttttagaaaggggttcgttacatttaaatgatttgatactgaaaccaagagtaaaaatggagaaataggaacataaaatcatagcaacgctgcagatactatcttaacttgctcatacatacagaccatttagaggtggctgtgctattcggattatactttttgataatactagtttattattctccgataactagtcaattgtatgcagggtgggaatttttaaaggatagcaactgtcagctcacatttgcagttttttttactagttccacatttctctctctctctctctctctttctctttttctttcttttggaagcaggttgcaaaacgattaacaaaaaatattgcttgtttcatacaattctgcataggtggctatgctcattaatatgataaatgaaagctggtgtccacttgattataatatatgaggttgtttttgcattccagatgtcacttcctgtgggcaatgagtttgcagtttcccaaatggaacatgttttctcatggtcaaaattttcataccattaaggtactttttaagattatttttatttcacagacatctatgccaaccaatgtctcccagaaggaaatatccctttaacccaaccatttccccataaataattaacctaattatttccacttattttctgcattattggatatttataaagctgatgaattaaaaaaaataatcattctctgttcttggcctcatcagagacagcacagtgctgaaatggcatcagggaaagctgggttgcttttcccaaagaattatgtcgtgctggtggtgtgatgtaggagtcacatgtggcattagattggggagggtggtcattctcttattaaaataaacatctaactttacatataattatagaattctacccttatagaactctagatctagttggctctacataaaattttatatgtgtatgtgtacagccttttgtgtttgtctctctgatgcatggttgctactgaagagagattggaatatgtgccatttgtcaggttgcaagtataattcactaatattgtcctgtaaacctggcacctcgcttgcagaccaggtaaaaggcccatgctagaaatgagttaaatacacacaggccaggtacggtagcatatggcattctgtttacagacatgtctcttgtccataactctactttttttttattataaagcttaccatccaatgtaaatcttctgtagttaattgagaatgcagagctgaatacagagtgggtccactgtttgccaccagcatatacttgtcaacaaactattcagtagtttacttcatccactgaaaagtaaatgcatcactttacagaacacgaggtatagtattaatggtagcattaaagttgaagctgtccatagttaatcatcatatttctagatctcaagtaattaatgactctcaacctgaaaatatggagataaaagatctgggagtttttaatataggtctgttgataaatggttgtttgatttagtatatgtagtatagtccaagtttcccaataaaaattaaatgcaatacttttgtcataaggttgtaatatgaaataatacatgaaaacttctttgtctatgctcaaatgatgatctcaaaaatcattacccctattattggttgtgtctattcattttcttacacgattataattaaattttatgaatcactttgacatcactgagtgactctgctaaggatggtacagaaaggtacatctcagtgacgtcagtgggtaagatgacacagttcctaaccaggaagcagatgaaccagatcaaccagaggctactcattttaaggtagatattgcagtagcaattgtacagaagaataaaaatagctgattctttctgtatactgataactttcttcaaaacatcttcaaactgtatagaaatctagtattatctgatctgaataataattaataaatgtatttttctaacggtaattttaaagagactattatgagcctatgctgttttatctattaatctatttataacctatcaatcacctattaatcatgtatttataatctataaatcatctattatctagttgacttctatgtattcatgtaactatatgtttagtatatgttttcttatatataagtgtacatataagaatatgtatttctatgcacataatctcttcatccatcttaaatatagattaagaaacaattactatattatattaagtattatctcaatccatgttaacgttctataatattttaatggttacattttaaaagtaaggtgataatagatagtagccaacctaatgagatttttatttctatttaaaattttttgggacaataagggacaggatttagaatcatttattttccttcaatatatctcatataccaccagactcagatttgataattatgttatttgttttgtcttctaaataatgccttgacttctgatccataactggcctttttcctaagagatgctatttgtgttttgtgaactctagagagctaaatactttgaagctctctttgttctgcatttggatagtcagaactaggtagaaatatactcttagccactggcataaaataaaagcaattataaattagagaattttcaataaaatgattcatattttcaaagaaccatcataagtgttttctaagattcataaccctttttcacaccatcatttatagtgaagaaatgaagtggccatctttcagaaatcaattcatgtttgtcatgtacaagtaacatccattaagatctactgcaagcaattacttactaagtcagtgacatatgagtagttaagtttgtagacaagaaacaaacaaaattctaccttcacccataacttctcttggctgcctaacgtttctctgagcattggtgaaccagagtcccagcagctgttcacgtgaacgtcaattggttattcacaatctttatttttgtaacataacagagtcacttggaagcctttagccttttggctctttcccccaagcacctaatagaagtctctcccgtgggaagatgttcttgtctgataatgtatgttgaaatgcttttacaaaatcgctggctgagaagggaaaattgaagtctgaagagagaggaaaaattgtcataaaagggctctggatataaagaactgaattggacttggaacagattttgagataagttttttttattatgggggaaggaaaaaacccaggagtcaacattcatgcgtgacattggggaactgacacagagggagcaaatgcagcaagataagaaagaaatgaggcctggcaagatctgtcccttatgtaggtctccagtggcctccagggatggtgctcccgagagtccttaacaggaacagtgcacaaagatactgagggtgacagggaaggctcgatgttaagtggggaaggtatatctgaaaaactctaggaaagaaatgcatcctaagtgcatcattttggtcttcattgcatctatctcactcttttacactggtggtaccaagtatgtatatagtgcttactgagttttgagtgaaacatcctgattcttgagggagatgccaagcagaggagataacatgcattcttctgcttggggatgaatcttattttaaggagttgatacatagtggcattatttaggcagaaatcaacaaaagtctgaagatggtccctcattttattatattattaaagaagtttataagcacatcaataagccatcaatatacgaagccaagcaagcacgttgacgccagttttaagtgaagttgatctgtgccttaattctctatatcaagtgttttaattctcaccctgcaaccaccctgcagatgacttatggtcaacagaagcaggactttatgagcatgctcatctggaggtatcaaatgagagtatcgcctgtggtagaagcaaactcattcttcttgtttttaactatgaagaattgcagagttgttcaactctgtgttttatatatacttttacattgtagaccatagctcagtactaagagtccccagtggattgtaaattatgaagtagatgtcaatgcattcttcagagtatactcatagggaaggaacctgttcagatggtcttataagaaggcagggtagtagtttaaactcccctctcagctgtgagtgtggtattcagattgctcacaacgtatatatttaaaaagaatatactttctttcaagtgtatacacattggaccctcagtgaacagacatgctcatattgagcgtgaaagctctgatagaaatcaaggtaaacaaacaactcaactctaaaccaaagtgagtcatactgtttatcataaatatttcataaattttgctaaatccaatcccacagagttcaaaagagtactgcttactcactcttatggagatgtcatctacagaaagatcagtgctttgtatttggttataaagtctgaaatcgaacattcttgttaatgcataatggatgtttcagaatagaacaataaactcttcaggttattaagcatcttgtcctctgcacactcgtcagtgttggtatcagaggtacagaaatttgttcattgtcttcctcttctatcaagtacaatcttttgaggcagctggcttggttaatatttaaacaggttcatttggatattcctcaaaaagcatgaaagagtcggctgtgatttcaggaacccctcccaaaattggttttggacaatcatatgattaatttggatataaagctggataaaatattttgtgatggagttaaataacactaatatttgaataatgatgtaagcttagattttcatttaaggcaattttatgagccaaataaagttttcaagaatagcaatttatcattgctgtatcagatgaaaggaaactaatgattttttaattggaaatgtttattctaatacatacttttaccacattgtgcatgcttatgtcaaggattatttttccttattacatgttttcatagaaaaactaataatgtttctatgtaaggcataagtaaaatggtaacatgtacacctgtcttactcagggttttacggctgtgaggcgacactgtgaccaaaacaactcttagaaaggcaaatatgtatttggagttggcttctagtttcagaagtccagtcctttatcaccataacaggaagcttagcactgtgcaatcatatatgacccaagaagagtcaagagttccgcatcttgttctgcaggcagccaggaggagactggaattccacactgggtggaaattgagtcttggagacctcaaagaaaaccccacagtgacacacttcctccaacaaggccacaactcctaatggtgctccttggaccaaacccatgagtctatgggagccaaaccttcaaaccacaacatctgtattacaattcttgtcctaattagttaaatgcaaaagctaatgtctacagcattttctctaaatagaacattgaagaaaaacacacatgtacattcataacacataagtaataaatacttgtctttagaagtctgtaattctttagaaatgctttcaaataaaaagtatttctaggcaggatatttaataaatatatgctatgttttgtttcctgggttgatgcccagtctaatattctggggattattgtgttcagtgcttatattaatattgtttctgtcatttaaaaataaacatgtgtcaggagtacttcttcctttaaaactatggcagtggtgttgcatgccttttatcccagcacttgggaggcagagggtggcagatctctgagttcgaggccagcccggtctagagtgagttccaggacagccagggctacacagcgaaaccatgtctcaacaaaacaaaacaaaacaaaacaaaacaaaacaaaacaaaacctacagctttggaatatatttcccccactgttcttttctagcaaggcaaccaactatgaagaacatgttttggaagtgtagaactcacatcataatatacatcttatactagatgtaagaaaatttacttttttcctattaatatttcacattttcttttaattcagcaggaatgatagagggcttcactctaaaatactcttactttgtggaaattaaattaaggattactcttaaataatgtttactgggcccctctttgttctgttgggtgtaatttcttcctacttcatccctctacaaataaactcctggaagtctcccagtgttcagagttgtgtggatttcagcaggaggctgcagtttggctgcagtttggggcctggctgtttaagttctttatttctgattaatgagctttgcccacaagtgtgtgctcgtcataaaatgttaaaatcctgatgcaagaaacattcacttcttctggaaaaaaaggctgtcccttgctttccttgtttattctcctcttgttattttatgcacttccaatgtaagatgctatcggttgatgagctcaaatgtttgaaacttcgactcagttcatgcccatctagagaacaatgaagagcatgcctttgttatctgtgttgcatctgaatccctagtgtaaaatataataccaggacactgccttggcctgggatgctctggtcttttgtgcaatgagttagcagaaacttcattctgtgttctggatctagaaggggttatctaggggctgtagttgtcagctgcccactataagtgggcctcatggtacaggatgctctagggttatcctctaatacagagttttgcctttcttggtacagagagggctctctctctctctctctctctctctctctctctctnnnnnnnnnnnnnnnnnnnnnnnnnnnnnnnnnnnnnnnnnnnnnnnnnnnnnnnnnnnnnnnnnnnnnnnnnnnnnnnnnnnntactacttaacttatttagaataaaattaagacagttggtttaggagccaaaggtcatattagatagggcagatttattgtcctggcaggattgtagagtgctagtgtccaactgtggtgttcacagggcatgtaacttcaagttcttcatgggcctcattctctctgcttgtgcccaagaatattgacttttacaatacattgattgtgacctgacagttatatctccttctgggcttattgggtttcagagcaagcttatttgtgttgtgtctccgcttcctgggttattaccttcctcttacctttcgtaataggtgtgtatgttcattctaccattgcctgtgagttttgtggattgcggaccttggaaatgtatttctgtagctatttcagtcctatatcttacgattcccctagaagggggtggaggtgtgaaagtgtaatgccatatatttatctgagctctacttaaactgtatgtgcagccctgttcacattcgaaagccctggtttatattcagacattcactgatctagtttgcttgtaaattaacaaaccatctggatatcagagattggttagatgatttatagtgttttgtggttctaaaaattaattttcatctccctgataccttatagtgatcaggtttcagagaggaatggggaatccatcagagcttctgtgcctctggactcaactgagtcctcccagtttgctgggactgatttcagtgtgttttaaagggttatttactttcatggtttggcaagacccagatagaaggcagctctcagtgctggtggtggcagagagaatactaataagtgttagtcatcagcagtaaattaaaaatataataataaaggaaaattaaacggctgcatgtttgggtgcttcctctattaccataaatctacactctcctgtcttctctaaaagcgagtgggtgtggcggaaagcatttgtgaatttccattagcattttttagagacaattgctctattaaatgtttcaggatttagctcctagcttccaaagctcaacttagatcagacatttaattccaaggcatcctgtctacacagcacaccaatgcattagaatgaaaatgtctgttagcctctagcctagattaatgactttacacaccacaacctctccactatcctcgtcttcaataccttcctccatctgcaccctcctccttcctgaggaagtgctcatggtagccccaaagtttcatgcctactgtgagggaaagattatacttatagaacttccccttggagattgctaaaaagtgcttgagagttttaatctagagtgcaatgcttggttcataaaatgaattaatacattatgctgtatcctgagattcggacttcaaagcaaacatgtccccattatagaactgtttatgatgcttaattttgattgtcaacctgggcacgctagggaatgaagaggtcattaatgaggtatgtatatattggggtttgtctgcaaggttgcttccagagaggattagctgagcactggatacctaacctgatttgggggtatcaacatcttatgggtcccattaacagacagaataagtacaaaggtcaaaggaaaggtagtctcctttctgtttctttatttagacagatgtgagcaagcaggttcatgcttctgtccacacattagagctcttccctatgttataacttctcaatcagaagggatgagaccctcaaatgctgacccccaaatcgacccacctttccctaaattacttctcaggattcttctcacagcatcaagaaaatataaccaatagagtttctaacttttattgcatacgttgatgtgagtgtgtgtcgatgcaaccatgcaactcaacagtaagtcagcattcccggggtctgatgttaaccttccttatctccctttctctggaaatccgccttcctctttctctgtgaagtcttggtacatagcaagtttgattgccttttagactaccaagacacaacataggaaggagtctgtactggtctttgcttgctagaccacacaaatagcaatatgagtttgggtcatattacgatcaatcccacagtgcaacccccattttattactaactctactgcggccaatgatgctcatttttctaggaacatgatcattttggcaatctgtacatgtttattctatgccagcccccaaatcacagagggctgttcattccaaatcacctttttaaacaaaatacattttgatgtcctttcacaaattggcatgaatgctttagacaagcaggaggccaaaaggatttgcatctctcaggtcttagctttggccagggagtgtagctcatgcaacaatgtgcagcgtgaaacgcttctgaggagctgatgcacattgaagagaagtgctgaaaccaatactaagataccctaccctgtcagatgctctcagtggaagcaataatttagccgcaatctagttcatatttcagaggacagaatgtaaagtcgaagaagctagagagaatattagtcgttggtggcaggaacaggagccgcatatcttcagttgttccattcaaaattctttaaaacatgccaactcactgatgctatttcaataggcagagctgagaactaaattccagtgcaagtatcctagagcaacatgctgtgaccaaatctccataaacaattgataagggtatcaatatcatctgatggtacctaatagtttcagactaaaagcatatgctttctcactccctccatccctctgccctccccactgtgtgcccctcctctctgcatgccatctcccattttcacctgtccctgttctcttttactatcttacactcaaacattcatccttctagttaatgatctatactaggtgggttttacatcagccatgaagtgcagttcggtttttctgctgcttctcttgtggtgtccaggcactgctgcacaccaagcaaggtaggatgaggtggaacaaagatccatagtccacatcttcccttgtggtatccgaatcctaagtacacagggcaggaaaggatgggtcagcaggctctcagtcttgcagagaatgcctgaggtaggaggtctcagagttaacagctctttcagatgacattccatgaaacagctctcttggaaggtgttcagcaaaacagcttgtgtggatacactttaatagaggtgaacaaggtctatatagaccttggaaagtggagaggggttctccttagggtaaagtttcaatggctgatgtttaaggttctagatacctcatttgcatgtagaggcacgttccaggaagtggaacttgcaattttgccaaggactatctggcattcctcaggtagagaatggaggttgggggctccccagataaggtcctactgggaaagggagacctccattttgcaccaagctcagaggagctatttggacatggtagacttcaaacttatgtcgagagttacccaacaatgaagaatggccttttattttgtatagtattccatgtagtatactgtggctaaatactgccttactagagaacacatgaccttcccccaacttgtttggtggggcaaaggttgttatggtgaataactggtatagttcctggtgtgtacaaggtatcttaaagatggttcccaaattaagattgctactaatatttgaattattgcattaatatatttgtattattgtattattttaagagtcttttctagtgcatagtagaaagcatatttgcaagttcctaattttctaaagctattatcattgtgctatgagtagccaggagtttaccacccagatctcctgtagcaacagtaatttggaagccattcctggatgtgtcctttgggaaaacctactaggaggtccttccactggggtattttgtgatccattgtctgtatgcattctagtgtatacaaacatttttctagtgattcattttaatattaattttattctctattaagttttttaattgacagttttattcatatatatgtatgtatgtgcaaggtacattctatttactagaatcttagcctctcccatcttcctctcactgttattatccctcccatctctacttgtccctttcttacattcatgccttcttgttttgttttgtgacctgctgatgttagccactgctgtctatatgaccatgggtttagaactattcactggatcatggtggtttcatcacatgccctactgaagaaaatgtctgccttttttgatgaatacatcagtaacatatacttcagcacggaatggcatgcccaagtggacccctccacagttaatgactggttgctgaaaggtccagcttcctgcgggcacattgtaggcagccactgctgtaatcataactgcattagctgcatcatacatagaagatgtcagctcatagttcctgccctctggctcttccatattttagccaactttttggccttgttctccaagacttacaggatgaggtataagcatcctgtttagggcccagccccaaacttccacttattctcagaatagtgaggatctatgtattcaccattattcactgagaatagaacttctgctgagtaaaactaaaattagcttttatctataagtgaagacagaaatacatataaataaatgccttctagcgacgtgacgctatatcaattttgctaaacaatagcacagtttttccctaggcccttacaccttctcagtgatgactttttactgcttcacagtcccaggaatggatattcttttgtagactaggctttaaagccaagcacagagcagttggttgcccccaaaactgttgtgccactattacactagtaagtacattctgcctggtagtttggtattgggagtcatagggttcccaactgaatatatgcaggggaagagtatgggtgcctttatgtgtacatgcagagatgggggagggaagaaggcaagcggaagaagaagagaaagtgagtcctgctttgcacattaaggcataaagaaagctagcaagaatggggggtaagtttccagctcagttccagtttgattactctgtatcctggacccaagttttgtgttattttcagccaggagtcatatctactaagtagttctgatgagcagtatcaaggactgtcataagcctatgttttggaggaaagcctgtggagcttttcttgaccaaatatatcataagaaaccggcctacttctggctctacaatttttgtataacaacttctggcttttaggttcagcactgtttagttttgtaggttattacccttccaactctaatatttttagttgcttacaaagtaataggtgtccatgtacctttgtaatgtgcccctcattcatgtcagccctccactgtgttctctcacttctgctatgcccttctccccatccacacctaagtacccttgactatttactttctgggtgttcttattatacattcacaaatatatgaatacaacctactgaattctattttgttgtttgtgtgaatatggcttcagagagaggctaattatcagaagtcattagttatttccccagctccccctccccctacaacttccacgctagcagatctcctgacattgtcatttttcaggtcttgattatgtagccatttttatgagactgattcatcccaaatatcctagtagtctggctttgacaatatttttgcccccttttctgcaatgttctctgagaaatggatggaagaggatgatttagatagattcatagagtttgcccccaaaatccactgatctctgtactgtgcccaggtgtggttttctgtgatggtctccatttgctacaaatagaagctcctctaatgagaggtgatgggatacatttatctgtgagtataaagctaaaatttagatttaattaggaattatgatggtctagtcaaatagtggtctagtcacagatctgttgtgagatccatgttcacaccagtcccagaatgttcacttcccctcctgttgagtaaaccataagtccagttaggtatgacatgcttctaccaacacgtgaggaccgcaaattattcctttatagatatcttgtcatgatggtcattgttgtggttttaggtgtcactctaggttggactattaactgtttgtctcccttgtcagcttgcctagcaccttctggtaccacggaagctaagatctcagaaatgagccttttaggtaagatctcacttaaatactctgagccccgtgacctaagcatgtggtgtccatagcaacaagggcttaccctcattccctgaaagacagggcatcagcagtatatgttattattttgtaaatcatctggatcaccctgaccaaatgtccaagagcagatttcccatgcatacttgttactgttttgtttgtttgtttgtttgtttatgcttcctgtagggaaacattgccaagtgacatctctcaagtgtgtgcatgcatatgcatatgcaccacacatgtatgtatatcatcacactcatcacataatccccagagacagagagagagatgtttatatgtattgtataaaactctaggcaaatatgaaaaactattgtggtccttgaggtcttatctttcctcttctatgctttacagaacccacacgaggcaggcggtcagtgactgccctttctctgcttccttccttccatatttgtttgccttatttccacatttaaagcatgctgcatttacattctgttgtctcacatttatacccctttgctttataattaagtgtagtcattgattttaatttactctgaccaacgtgtcaatcctacttgagcggttttgtcagctaaggttcagaagaaaagaattcaatgagcacgtgcacactgacactctctgtccagactttgatatttaagaatagcttggatcacattttgtgtcttggaaaacttttggaaaacattttcttacattgagattctttaatacaaaaatctatgttttacttttcttaataaacactgggtagtttccctcacatagcagaaatattctttctttattcataccattttacacttttagcaggctattagattgttggccattctagaaatgttttctaagtatgtggtataccatttctttttgtaaacttgtggtttgttcccttttttaactgcaaatatattttgcatacactatatataaacactgttaggacacaccatttcagcatttctcttttataatgattttaattttgagtatctcttcttactatatttactacctctctactattacttgaagatcacttgtttactctgatttcttcttttgatttctctccatttctttcctatgtctaatatggctgttcctcccatagttccgttggtttctttccatgcgtgtctattatttgggttccgcttcatcacctttcactattcactattctgtatttttactgcagatttcctttaagggctacaattgcttcaatacattttaaaaatttttgcctcaagttcaagtgatattttcctctttgatgctaagacattcttttcagctttgtttccttcttctgtggagacatttctcctcttttcctccctactcttattggcatcttacactgaggttatagttttgttttgtttttgttgtttatctttatttttattttttgaaatttttattggatatattatttatttacatttcaaatgctatgccctttcctagtttcccctctggaaacctccaattccattccctctccccctgcttctataagggtgctccctcacccacccacttacttcagcctccccaccctggcattccccttcactggggcattgagccttcacaggaccaaggatctcttctcccattagttcctgacaaggccatcctctgctacctatgcagttggagccgtggatccctccacgtgtactcgttggttggtggcttagtgcctgggcactttggggtggggggtggggcctggcgggcctggttggttgatattgttgtttttcctatggagttgcaaaccatttcaactccttcagccctttctctaactcctccattggggacccagtgttcagtccaatgattggctgtgagcatctgcctctgtatttgtcaggctctggcagaacctctcaggaaacagctatatcagacttctgtcagcaagcacttcttcaaccaacctccatattactttctcttccctgtctcctaaaatttcagtacttcactttatctgcaatagtgtctgggtttggtgtctgtatatgggatggatccccaggttgggcagtctctgaatggcctttccttcagtctctgctccatattttgtttctatatttcctcctgtgagtattctgttcccccttctaaggaggaccaaagcatccaccctttcttctccttgagcttcatgtggtctgtgaattgtatcttgggtattctgagctttggggctaataccttttgtgttttagaatgagacctattagagtgggttgctaattcccaagctgtgagtttgagatgggcacagcaagaaagtgcagaagaattggataatgatcctgatcacgcaatttctcctcttgctgatctgtgaaactttaggccaccggatttcctttggccctcggcacccagacttttaccaatgagctcacttggttcttttctacactgtgaatgctcacagcccaccaccagccactgtgtgggactgtttggctgatctgtagacttttggccatatccatgtttagaaataatttgttcgtggattttaaaaaattagttttttattatatattaatagtatagcatttcattatagccaacctccatattactttctcttccctgtctcctaaaatttcagtacttcacctcattctaactagtctcttttttactttcctgcctttaaaatatacatttttaaaatttgaatgatatatatagtgtgtgtacacacacacacacacacacacacacacacacacacgtatatatattccatacatgaaaacgaaaacaaccacatgatatcaggctttctgagtttgacttattttgcttactacaatgatctctagtttcacgtattttcnnnnnnnnnnnnnnnnnnnnnnnnnnnnnnnnnnnnnnnnnnnnnnnnnnnnnnnnnnnnnnnnnnnnnnnnnnnnnnnnnnnnnnnnnnnnnnnnnnnnnnnnnnnnnnnnnnnnnnnnnnnnnnnnnnnnnnnnnnnnnnnnnnnnnnnnnnnnnnnnnnnnnnnnnnnnnnnnnnnnnnnnnnnnnnnnnnnnnnnnnnnnnnnnnnnnnnnnnnnnnnnnnnnnnnnnnnnnnnnnnnnnnnnnnnnnnnnnnnnnnnnnnnnnnnnnnnnnnnnnnnnnnnnnnnnnnnnnnnnnnnnnnnnnnnnnnnnnnnnnnnnnnnnnnnnnnnnnnnnnnnnnnnnnnnnnnnnctgtgctctgggcaggcagacacaaacagagctgctggacgcttttccacagggcccccccccccccagctaccttgctagcagcccagggttgtgggagagagggaatgggggaaagaagttctcaacacctgcaagagtggcacagcggatctagaaggagcagagactgtctatggtttaagagctttattatagaaatgcaggggaaagagagaaagtagaaaaaagagagagggagggagggagggagggggaggctagagagaaagagagagaaggagaaagagaggagaggagaagacaaagagaatgggaagaggagagagaagtaagagaagtgagaggtaagaggacaaaggagtaagagtaagagagcaaggtgagggctgagcacccctttttatggtcttcactgttgctaggttaactggggaggagtttagcctgaaggtcagaagcttgggccatagcttaccatgcttctcttgtggggggtgtgggaggtggtaccttaggcagtggacggagttgcaggagcatgagggaaagcctaccgtgtcatgaaggtgaattatgaccatcggggttcagacctcagctcaactggagaccagcctgcaattccccataaagctcatgccataatgtggatattgcgaatagtgcccctcgtaaacatggcatgcacactaactcaaactctaaggcatattcactggagtggttctgttgaatcattggtgagagatgggatgaatgtgatgagaaatctaaacacagatgattttgtttagttttaaaagggaatgaaaacttaaaaatgtttttcttaatgatatgaaatgaaatacttagaaataaagaataaaataccaagattgctcacttgtgtaatttcattccttagtctcttctgtcagaacgagtatgcagtaacctataaaggccttaacactatgatgacattctgtgcgttatgcatacattagtcttattatcttctcataaaaataaactttaccaaagttcaaagaactgaccttttagtgatacaattttccagcaactttccacaaacaggaggaacaaaggagccccaggtaagagcgaaaacatcaagcctccagttcagattttgttaattaataagcgttgatttgctttttatgttcccttacatttgcattacatagcttgtgggttaagagtgttaccaagtgttttctcgaggtgagaagcatttacaagtgaacctctaagcactgtgtctgctggaaagttataacaaaagacataatagcctagaaaccatgcagttaaactctctaaaggtccaatgttccattgtttcaccatgagacttcacaactgtcatagtcattagtattcaggagctttacaatggtcatcatgtttctagttttattaaaactgaatgtcattcagtcagtgctttgtagaagtagactatcttctagatagtgatatttgccagctctgtagagaacatcatatgaatgcatgatataataaggtacacaatttacaggtaccttcttttctcttgtattattcatcattaatatatagaaaaacctgagtcacagaacaatgatctttatgacatttagaactgtttccttttttggaaagaaagtagacatcttcagagatcccatctgtggagaagcaggtgcaatgatgttcttctaaaaatcccatgagatgattcctttttatgttcttgattcaagccaaatgttttctgagatggtagagtccctcttgtgagtgttgacttcaacagaggtgaagacaaatggcagggcttcacacacaaacacagatcaaatgtctaacagagcaagtgtgttagtttactaggactgccaaaacaatattgtagctgggtggcttaaattcagaaacgtgttctgaaggctacaaggtgctcacattatcagttccctctgatagttgctggggagagaaaggatccaggcttttctccttgccttatagcatgatgacttttctctgtgttccttcacatcaatccatctatctctatctatattcaaagcccacacttcagtcagatgaggtgagagccaaccttacagcttctttttcaattgaccacctttgtaaaggccatatctccaaataaggtcctattctaatagaccatggattctaattccaactcgtgaatttgggaaagatgcaattcagtctgtcatagtaaccatttaaatataagcattagtcatgctttaagcctttgcaatgttaaacaatgctattgtaatgtgtggtatttaacatagtctaaaataatcctctgtatttttatcaacatttaagttacttttagctttgtgtttaatacttgataaagtagtgactgaatgcctgcatattgtcactcactcttcagtgctggcaggttatttcacagtagttcatgttgtggcttatagtagatgagagctgttacataatatggacagggtgaagatttaaaagcacattcacactggccccaagattaatgtcctatgaatggttagtggtattttatttttaaatggtcattttctgattatcttttcaatgcaagcactgatttctttaccataaaacttgggaggaactgtggaactaaattttaaattaccccaaatttcactctttggttgaaatccttacaaaagtcacatggaaatgttgtgataactcaacttacattcactcagttgtagaatgacacagagaactttgcacagtacagattcttacccaaatcacttttcagataatctgcctgactacacctcatctcttatcattactggagaactcttgtttaattatctcctcattctccgggatggaatgttctataagcccatgggattcagtttcctcactggcttttgtagagttctaagagatgaatggtacaaggcagagtaaaagataggcaatatcttcattcagttttgtggttaatttctcacactgatacttttactcagacatgagtaagtaggttgtctatataaatacacatacacgtatacttatataatatatgcaacagaataacagaactcatctcttacttttactactgtaaatcagtcaaccttcctctgcccttcccgccctccatcttctccagcccctagtaatcctaattttactctcagcttctttttttagaaaacacatatgagagagaatatttggtatttgtctttctattcctggcttactcaacctaaaactctccaattctagactgttgtaaatggcaaaattttatcctttcctgactgatatgccttcttttatggacacagcttttcattttcacagaaaatttccacttcttaactatcatgactcatctgtcaacaaacatgcatatgcaaatgcctctttaatataatgacttcatttccttagggagtatactcagaagtgggatttctgtattatatagtaactctattttaagatttggagtaatgaccataatgttttcgaatagtggctctgtgtgtgtgtgtgtgtgtgtgtgtgtgtgtgtgtgtgtgtacataagtatgtatttactagcaatgacaagggttttatatttttctaccatccttgtcaatactttgtagatttgctctttcaatcataggcattccatctaaaggggaggggagtgttattttgctatgattttgaactatatttccctggtgatcactggtggtgaatattttttgcatgaacctcttatccatttttatattttcttttgaaaatatctatttgtttttgacatttaaattggatatttgagttctttttatatattctgtgagcacagcattactaggtccacaaatgttcagagtttgatattactttctagtcttctgtagattttcactctgctctgaagatgatttcctttgttgttcagaggctttttagtttgaagaaatctcaggtgatttttgtctcctgttcaactcattgcttggtgtaaattacacatttcaccccactacatcacctcaagcacatgctcaaaatatcaagtatttaatcaattgcaatgtattggctgtaggcttgactctgaatgttgtggtgaattaagtctggactccattcaatgacatgcttaaaggagtcaagtaatcttatgcggtgaatcctacaagcaatcacttgggaacagtctggtaatgtttctcatacagacagtgctgtttaaaattgccctaaaagctggagaaatggctcaaaaattaaggatacttgctacttttgtagaggacccagatctgatttccaggtggtagcatatgatagcatacaaccatgtgtatctccaattctagatgatttgacaccctattctgatcactttgtacaccaggaatataagtggtatgcacatatacagacatgtaggcaatatatatatatatgataaaaacaaatctcttggagagatggctcagcaattaagggtagttactactcttacagaagacccagatttgatttctagcacccagctcacaattacctgcaactactgctgattaccagtcagcaaggaagccaatgccctcttctggcctttgtaggctgctgcatgcatgtggtacacatgaattcattcaacacagagttaaaaacccaaaccaaaccaaaccaaaccaaaccaaaccacagagtaaagaatgttctacccccaatctttctttagagcactgtggcttaacttgaagtcttgctcagatggcaaagcctggcctcagttccagtggcgagtgacatggacttcataatcttttgacccttcctgtagtagagataaagaagattgttatgagggagagcaggcagatcccccagctcctttcttctgaggcggtataaaggtctaaagctcttttgaagtataaagtcccagaatgcaattcaagccctctagccttcttcaattaactctctgcatccaaaccatgaaaagaatcgccttacagccctggaccactgcagttacttaccattctcttgtgtcattgtgatgaaccatctattcctgaaggacatcctattcaaggataaaccttcaagtcagtgctacggagccaaagaacttgtctgaaaaagaagtccataaaatttcccatgatctttatttttacttgtttgacaaatctctgcattgagttccagagcatgtgtggaaatctatattcccaccattgataaatgaggggttccctttcctagtagggaataaatctctaaatactacacaaatgcctgggtcctgaaaattgtacacttgaataacctgtgggtcgttaaaaaagattagaaacctaaaacattctagaatccaattaaaagaaaagcacctattaccagaaacttagggatctaggtaacgtaattcaaagtggaacattgatagatataggcattatacattacaagtcagaaaggtctccaaaagacaaagcaaaacaaaaagctaatgatgttattagaaaaacaacaattgaaaccccaaagcagtagagagcagtaggtaccagggaataaattagtgaaatggaaactaaaagaacaacaaaaataattcccaggtccttgatcttgtcattcagtaggaaggctgcagtcctggttcatagatgtgagaagttgtcatgttaaagaaccgtgctgccaacgagacttcttatatctgaagcaagagatcactcagaaatcagagcaataatctattgcttgcttttacatcagaaagcctaaataaagctcccaagtgtcccgctgtattgaaaattcatttgactagttctctcctgctgtcctctattactagtttcgctgattgtatttaaagccttgttaccacaaacaagtacttattacccttgacgtttaactaaagtgcattagcatatttttgactagaagtaaacatggcatttctgggtgacagaatattttccctgagcaaagtaagtgtccttacatatctcatcatgaagcaattaaagggcaattaatccattattagagcatgtgtgggtggttgtaacatccactccatcaatattggcaacctgatttatacttttggtttagtactttgttacataattaataatagttgcattgcattttccttatgcatgcctcctataaaaacaaacaaacaaacaaacaaacaaacaaacaaacatggggactcagtggttaagacactgactgctcttgcaaaagagcctggatcagttcccagcacccccatcctcatgacgattcctaactatctataactccagttccgggggttccaatgccctctgataggccctggatgtgcctcaggttctcatgaggtatagagattatatgtgtagacactcctacacataaaaagatgaatatatcattaaaaataatattctatagtgtatacgcatcacatttttattatccattcatcaggtgtagtacatttaggttgtttcctagctgctgttgaaaaccacaaccaatcaaaataaagctgtagagcttattccaaacagatacaggtatgaaacactcctatgcccaagactcaggaaacactagagaagaggtagagggagggttgtaagagctagagaatcagggagttctctgagattgtgtcttctaataatgtcagaagctacactcataaagtctccccagcaggataacccaaatatgagcagagcaagaatgatagcaatggacatgctaaactgtatagagaaaagcccatgaagtctcaaatctacaccaagtactaaaggaaagtgaagaaagcaaggacggggagagggttgttcttccttcaggagtagtacaccaattggttgtccagggataaatagccagccctaaaaatatacccgaattagcactgtatggactgaataagttatatttaaaaatatatattcaataataattgatggaaaaacaagatggaacgaaaggaatcgggaagttttttaattaaattataatctcagacccccacccagtaagtggaggagaggtggaagagaaagagcagcagtctggtgcgtacacagtgaggagaggcagaactggagatccgagggcagtatctgcaagcagaatactgtgtctgtgttcatggtccttattaaccctaaaggccatacagacttttctgatctagactgccttcttgggccatattgatgtcccttggctatacagagctagcccaccccttccctgagaagcctggcagagctggtcctgagggcatgagggatccagccagccacagcaatgtgggagagtggactctgcaccttgcttggatgccacagtagagctggcactggtggaatgagcataggagaacaaaacaactctgctgctacccaggcccaggaacagggctttgagttggcccaccccaacaactaccccatggataaactgctggagcttggaaaaagcgtgttcctccagaaccaaatttgtaggatctccattgtccaaggcaacaacaggatgtcagagaggaatcctggtgagaatccagtattgattgtatagcagaagccagaggcctggactcagaccagtatcttactgcaatgaacatttgtaagtaaagctgtttgggtaaagggtatactgtgcagcacaccatgacacactgcagcttccatggtgagatttctatgttttgtattgtttacttttgagggaggcaaggttgcaagggcagaggatagatgtggagaaacagggagatgaataagaaagggtacatggtgtgaaatttacaaagaatcgataaaaaaataaattataatatcaaagtgaaataaaataaatgcctgaaaaaatagataaggtcccctaatctccttgcatgttaatcagaacacttgcttgcaaaggaaataaactgaactcaaattttgttaaactgaacaatggtagtagtattgatatattattagattaactataaagatatttgaagactaataagtgtaataaccagagagttagtaccttcaggacacctttataattaatgtgacttttgactgactctctctctctctctctctctctctctctctctctctgtttcatcactgtagtcctttgcacatgcaaaggccatagagtttaatgggaaatgagctttccttgttgcagaaagtattacaaagaagtccctgtgctacatcctgctactctcagccatggccagttcttatctcgtgaagaccctctgactcagagctccaaaatctctccacccagctctctaagttcccactgacgggttgctaacatgccagccccatgcttcaaatcccccatggcctttgttagtgaacatcaggacaaacccatgctttgccactgcaactttttctcttgaacccagacaaggagccatgtgaaggaaaaacgcaacacaaactcagttcagaaacaataaaatcctaatctggtaagccttattaaatctaaatcctctggaggtgaatcctgatggatctgccattgagactgggagacatccaaccttgaagtcctgcctactggcccagtgattggctcctttattccttaagggatgggtcacaagaactcgcttgagtatgtgactcattcttcattcacaagccttcccaggagagtggaattaacatcaaaatacaagcaaccccagggttatccacaatattgtctctattgtatgtatcaacccaaaccatggaagggatcccacctagttgtttggattgtgtgtttatttctgagacgcattactgatgatagaacaagggttatatgagtggctaggatatgaggaacaggactgaatgatgtcaaggatataaaggagtcagaaacacctatagtgaatatatgccctaaacttagggccccttccctaccttctttatcccaaacctcccacagctttctcttcctaaactcctgtttcctcttgtttaccagtattcccactggtaaattaaccttgaagcaatattttcaggctcctaccatgaaaatcttggacaaagtcttctctttcaatagacaaaaggaaaccccagtgttctgtctctcccactttgacgttactaaacgatccaacctgggttgctctctaggtgataggattaacagttacttaacagaattaatcttgcctatgtgactttaaaagaggtcaatgtttgggtcgtccaccaaaaaaaaaaaaaaaaaaaaaagatgcccgttttctaacaatcactcttcagtttgattttctttccctgaatatatttcagagaaaccatggaatcatctgaaattttagatacttctattgtgttgggagtgtgtacttattgaagtatggggcaaagatcaaccatttttaccaaatttgtaaatagattcatttcacaagcacatacatgtatatgtatgtgcacaaacatgtataaatattaagctaccataaaaagtactcatgcgtttctgtaaataaggtgaaatacttcaagtgtttatagaataacattatcaaatcattatgctacaatttaaaaggaaaagaaatacacattgcctccttatgaaattcaacataagattcttttctgatgaattaacaccatttgtatatttacacttatagctatatttttctttctgtgagattgtctagaatattgctacttttgcccatattgacccatgtttaagtgtgcatgtgttcttgcatttttattaacctttatttgcaaggtaatgtggttcaaaaccattctcaagtgaaaagaatcaggtctcaggcttgcctgcctctactacagaacatagttagagaaccttcaattcataattcacgataaccaacactagcctagaatctccagggaatgtctaatacaccagaaggttaaaagtcaaatggggtcaagcgttgtctcattgacaaatggtgaagtctacccattggctccagtcaggctagacttgtgccattagactttctaaatataattggagcaaaacaatcccttgttggggatattttgcttctttgatgattgtttcatattgatgcatccttgcttcctgacctctacagatactaactcaaatataaatagaattctaaatctgacactaggaaatgcctatgagaaagacaatatagcataatatataggttacctttctcaacacagttccttttaagtttcatctatctctacaaatttcattattttttacatccaaatagaattacaatatgtacatgtggttttgttttggattttggtttttgggttttttttttttttttttttttactttccactcctcggttgattgacatctagtgtgagtctatttcataaatgttgtgaataaagctgctatgcacgtgaacgtgcaggcatctctgtgatagcatacaggagtggatagctggatcatgtggcacttgtggttttcatttcctcagaaactgccacagtggcttccacagtggtgataccagcttgcatacattcccattatcagtaaataaaggtttccgtttccacatgagcttaccagaatctgctgtgaaattgattttattttttatcatagctcttctggatgaggtgagatggaacctgaaagtatttttaatttatatttttccattggttaataacctcaagaactcttggaagttgactagcttcagtttcacccccacacctatttggactgcttagtttcttgattacaagcccattatttcattttacttttattgaaaattgattattttctcagacagtagagcctgattatagcttccctgtcccctgtacctccagtacctccttcccttcctcccctccaaatctattccttttctgtctctcattagaaaagaacagacttctgaaagacaaaaactaaacatgacaagataaaatatgataatatacagagaggaatggaaagggagggacttggaagagagaggaaggggaatctgtgataaagatgtaaagtaaataaattaattcctgatagtaaataaataaaagtatataataggacagagtaatagctttcatcttaaagtcgggcatagcaactaaacaggaggaaaatagtcccaagaacaggtagaagagtcacagacccactcattctcactgttaacagtccacaaaaatactactataatatagacacagaagactttgtgaagactcatataagtcctgtatttgctgccttttccctcctggctcttacactccttctgccatctcttccatgggattccatgaattctgaggcaaaggatttgatggagacctccaatttagattctctctctgtataaggcctagctgtggtattttacatctgttcacatatgctgcaggaggatgcctctctgatgataactggataaggcactgatctttgagtatagcggaataccattaggactcatttcattaatttttttgaccagtcatgtttgttttgatcctaggtctctgggatatctagtctctgaatcttggttacccaagtactgtcaagtgtgggtttcttattgtggatggggtgctaaaatcaggtgttggttaaatatcctctcaagttctgtgccaccattgccctagcatattttgcagttgggagagagtataggtcaaaggatttgtgactgagttgatgaccatgtttctcttttggtagccttcagaatattgcaccaaagaggctaaaacagaggggtaagggctccgtgtaggaagccagatcaacatctccatgctcgatgacttgtgtggatgttgtctttggcagtggagccccactgttactttgaggagaacaatgttttattcaagcaacagctttggttgcttgggaatttccatgggactcccttggccaacaactcaactaaatgcaacctagttctactactgggaaccttgcctgactatgaaagatggccagttgaggctctgaatcacccattactaggattcctcattaagatatctttagattctagaaaggtttcattgcactaagttttcacatcaccccctaaatgcctctctttattccatcactctctccctcccacatctctccatcctattcctacccacccattcccatccctatttgcctctagtcttaccataaaaatttattctatttgctcctcccagagagatccatgcattcgcctttcccaagaaccctcctttttaactaacctctctaagtctacagattggatcttggttataactttcaatttatgtaatgactatgtctaattgcaagtgaatgcgagcaggccatatgcatctttctggatcggagttatctcactcatgatgctttctttcaagttctgtaagtctgagatttttatgatgtcattttttaacagctaagtaatactttagtgtgaaaatattccacattttctttatccgttcttctcttgaaaaacatctaggttgtttccaatttctcgatattatgaattaaacctcaaataaatatggctgagaaagtgtccttgtggtaggatgaagtatcccctgggtttatgccaaatagtgatatagctgggttttgaaaccactatattgttttccatagtggttgtacaagttgtactttcaccagcaacagaggcacgttctccttgctccacatcctccctgatatgagctgtcaatttttctattgatcttagccaatgaatgaatctcaaagcagttttggtttgcattcccctgattgctaaggactttgaatatatctttaagtgtttctcagccatttaatattacttcatttgagaactctatttagatctgttcccaactttaattgtaatatttcggctttttttatacctagtatcttgaattcattatctattttggatattagtcttcagatgtggagttggtaaaacccttttctcattctgtaggctacatcttcttgtctgattgatggtaccctttactttacagaagctttcccaattattaattcttgatcttatggcctgagctattggtattctgtgtagcaagctgtctcctgtgctaatgcattcaagattatttcccactttctcttctattaagctcagtatgtctggctttatgttaaggggttttggtccatttggacatgtgtttcctgcagactgataaatatgaatctatttgcatttgtctagatggaaatatacaggtttgactagaaccatttgttgaagactctttttttccatgttcatttcagcttctttatttaaaatcaggtgtccatatgtgtttggatttttgtctggtcttcaatttaatttccttgatccacatgactgtttctgtaccaataccatgcagtttttatttctattgctctgtagtactgtttgaaagtaggaatggtgtgacatctaacaattcgttcattgttcaggattattttagctatccttgtttttgttttgtttagttttttaatatgaagttgaggattgtccttttaaggattgtaaaaaattgtgttaaaattttaatggagattgcattgaatatgtagattactttcagtgggatggccagatttactatgttaattctattgatccatgaatatgggagatcatttaacttccaatttaatttctttcttcaaagtcttgaagtttttaaccatacaagtctttcacttgcttggttagagttatccccaaggtactttatattatttgaggttattgtgaaggtgttgttttcctgatttctttctcagtctgtcattagtatttcggagaactactaatttttatttttagttgatctgtatccagccactttgctgacattatcatttgaaggagttccctggtggaacttacaggtcatttatatataaatatatataaatatatatatatatatatattatcatctccgaatagtgacactctaaattccttccaatttgtagcctcttgatcttcttcggttgtcttaccgttctagctggaacttcaagcactgtattgaatagatacatagaatatagacaaccttgacttgtccctaaggtttgtagaattattttagtttctcttcatttaatttggtgttgactctaggcttgctataaattatttttaatatgttccttgtattcctaatatccccaataattttatcctgaagggtgatggattttatcaaaggctttttactttatctaatgagattaccatgtggttttgatttttaatttttgtttatattgcatattgcatttactgattttctcattgtgaactatccccaaatctctgcaatgaagtctacttgatggtagtggatggtctttctgatgtattcttgttttctctttattgactatgttttgcatcaatgttcacaaggaaaatggatctgtaattctttttctttgtggattctttatgtggtttgggtatcaaggtaactatggcctcataaaatgaatagggcaatgttccttccgtttctatcctgtggaatattttgagaagtattggcatgaattgaaagtctggtttaactaaaactatctgattctgggctttaagtcctttattatagctgatgctaagagttctatgggaatttccttagctagctctgttagaattctccatcttatgacctcttacagtcatctgctcaatacaaaagaacatttgtgagaccagctgtaagtaagaactctttaggaaattgaggccaattattttattttgacaaaaaaaataaagctccttggatattacacctagaaataaaagtctataacttgatttgccttaatatgatgtacttagaggtatctgataaccaaccaatcaggtttccctgaataaaatcatttcctcatttcttttgaaagcacatgaagtttcatgaatttatagtaaatcatgcacagcaaattttgcatttctctctgggcatctatatcccagcttgccccatcttttccacactcctttgattttttttcctcatgtcaaaatttctaaacagaactccttatacatgtatatctaacattataaaatactgtggtaaaagtgctggaaagcctgagttcttccttttactccatggacgtgcagtgccgttggtcaccaggcatctgacgtagtcacagccatgagcagaatgaacgtgatctcctttcttaggatattacagttaaaggggcagggatagcatgagttaccccagtcaggatagttttcagtttcatccattttcctgcagatttcatgatttaagttttctattgagacagataaaatgcacattttgaaacttaaacttcaatgtacatgtttttgtgttacagagagtgagtagagctaaaatgtattcaaggttaaacatgtttgataacattttttttccaaaaaaaaaaaaaaaaaaaaaaactaactagaaatgcaagtttaagatgaaattttaaccattactcataactgttaaagaatatacctaggttaaaaatgttgagatggtggtcccatccctcaactagggaccatgtctatctcctggaggtggtcttttcaggttctatctctctgcatttgggcatttcagctaatgtcatccccatcggttcctgggagcctcttacatccctggtatctgggactttctagtggttcccctgttccctaccctacactgctgcatatttctattcattctcctgacctgattctgggcttctctgctgtctccctccatacctggtctggccccccctttccctcccccatcccctcctttctctcactcaggtccctttctccctctgcctcctgtgcttattttcttccctcttctgagtggaatttacacatccacacttggggcttccttcttgataaactgtctatatgttgtattgtgggtattctgagctttttggttaatatccacttattagtgaatatataccaagtatgtacttttgcatctgggttacctcactcaggacaatattttctagttccatccatttgtctcaaaatttcacgaagccagtgtttttaatagctgagtagtactccatagtataaatgtaccacattttctgtatctattattctctttagggacatctgggttgtttcaagcttctggctattataaatatggctgctatgaacatagtggagcatgtatccgtgtgatatggtagagcaccttttgggtatatgcccaggagtggtagctgggtcatcatatagaacaaacccagaatggttcccctctataggaaatgcagggacaaaaaaatcaaggagagactgaaggaaaggccatcaagagaccacaccactttgtgatccatcccattcatagacaccaaaccctgacactattgctgatgccaagatttgcttgcagacaggaacctggcctggctgtcctctgagaggctctaccagcatctgactaagacatatgcagatacttatagccaaacattagactaatcccagggatctcaatgtaagagttagggtaaggatggaaggagctgaaggggattacaacaccatagaaagagcaacaatatcaactaactggacccctcaaaactcccagggactaagccgacaagcaaagagcatacatgggcagtccatggtccccattacatatgtagcagaggactgccttgtctgacctcagtgggagaggatacacttgattttgtcgagaggttgatccccagagaagagggatgccaaagggaagaggtgggagtggatgggttagtgagggagcatcttcttataggtgaaggggagggggtatagggtggtgggcttgtggagggggtaccaggcaggggaacaatttgatatgtaaatgaagaatataattaataataaaaaagaaaagaatacacatagagagaatatcttgtatattgtatgaatgcatcacttgttaatttaaaaagcctatggcttaggcagaaaataggaggtgggggatccaggaagcagaaaggattataggtggcagattcacctgggaagatgtaaagagatagacacatggtacctgagcaaaggtaaccacccatgcggcagaatatagattaaaataagtgggttattttgtgttatgattctagtcagagaagaacctatctacctatctatctatctatttttctttctttctttctttctttctttctttctttctttctttctttctttctttctatctttctatctctatctatctgtatatctatctatcaatagatagatagagctatagatagatagtgtctgagtcttacttttgggaaaatggaactgggaggaagaaccaggcctaacttctacaaatgcatgttcatgtttcaatagacaatagcttatgcccaattactatataatttaacttaagtttcaaagtgatttagcaattctattttaaatgacaattttataatggtataactgatcctatgcaaatatttaaacctaaattaaaaaggaaattaaatattgatggaaaatacgtggaagaataacttaaaaccgtgttacataaaaagtataatgaaaaagtttgaaggtcactggcattgaagacctcttttcaggtatgatccatgacttcatgtcctaaatagtcagctacattgtggtcaaattcagctatcatttatccaaacctggtcatgggtacgctggaaatacttaaatttaagatatagacctgactgcatgaaattatggtgatctcaacaatcaacacagaattttagcttcaggaaaatattaccctgtgggttttgaacttcagttgattagaaattcaaagaaatttactttgaaaggttcatgggaagtatcaaggtggtgaagagggtcctgaaatggttcggatagaaggcttctggcctttgtggttagagtgaatgccccatgagataaaccttgctgaaaataagtaaagaaaagaagagaccatgttcaacttaaaccacataaaatagagaaaactagaagggaaatcaaatttaatttttaagtagaaagtaagataaggacatcagatagataggtaaagtaggtaggtagatagatcagtagagaggtagataaataggtatataatagatagcataaagcaagtaaaatttcgcagtttgtgtaggagagactgagaaagaaacctttgtatcatcttccaattatcatctcttttatggtgttatatttgccctaggcagggttatcttttgagtcagtaacaggaaggcccaagataataaaagaactctctgtacatgtgaccatcctgccttactctgccactgttttcctgtttgatgcaatcactagagttgagtccattttagcttaggtatagatatgcctattatatatgctgaaaacttggctcttttactccaaaagggactcaaggtctgtcagcaatctgttatcagttgccccttggtgagcattctttaagggattggtcagtgactcgccacattccttctctcttttttgctagagacacctatcttgtcagaatggtgtcatttaatatatttttctggtatttttttcttcattggaagatcattttatatgaagattcacattcattgcagcagaagtgtatctgacaaaactgaagcatttatatggaaattaaattacaaatgtgtgcttgcttagtaatgtcagaggttctcctgaaaatgtctggtaaaattatttaatgtggatgagaaaactatgatgtctgtaaaaataatgagggaagtgaagtttaaaattatttaactttaatatcagtacactactgctgcattttaggtcaagattgtaaaagtctgtgtaacatgctatattttataaatgtcaataatttatgtacgttgtgcctcctcacagtgtgaaagagtacgtggtcttgcaaagccaatgactacaaatgagatcattgataccattgttccaatagcaccatgtcttaactccccatctgcttggctgcagcaacttgctatctctatcctctttgcctcccctttctgccaacgtctcttctctttatttctggaaatcccatgtgataaggaccactgtaacacttataagtggaaacatttaattgggactgggttatagttcagaggtttagtccattgtcatcataacaggaaacatggcggcactcagatagacctggtactggagaggtagctgagagttctacatctgggctttcaggctgcaggatgagtcacactgggcctgacttgaacatctgagatctcaaagcccaccccaagtgacacactgcctccaacaaggccatacatcctaagagtgccactccttgtgaacatatgggggccattttaatttaaaccaccacacattttattttaaataagtggagatattcacattgcttgtcattttgtctccctatcctggttcaggtctataagagagatatactatgcgaggtcactgtcacaaatgttcagccatgcatctgtgaattcttatctgatacataagagataatgaaagaacgtttttcatacctaactgcattttaaattctgccatctggaccctaaaggttctgacatcttagatggttttgatatttacatttttgtttgaaattacttacttcatcatttgactatagcttttctatttggcctaaaacatgaaccattataaaaatgccaaaggaaaggcagaccagacactgtaaccttcatcccatccatgttgtagtaatcagctcaggtcatagcaagatatcaaagaaatgctttgccctacacttcctgaaattggcactgtgagctcagtgtccatcaagtttgagttcctcaaagaagactcttttctagcttgtggatggtcactttcatactgttctcacctaggcttagtgagtgggagatggtgtctctctttctgttggctttagtggtctggcctcatggacctttctgatttccttcaaaggggatttgtccaaatataccactgagtagatatgtttgtgatggaaagtgtagccctggacttctgactgtctcatgttgatatcactgtctttccatgtagtggtgtgttttaaactgagaggatggaaaaacacagtcagtttcttagtatcaaaagaaagcatcagccatgggcctcttcctctacttcttcaagactgcccagaacattgacaactatctcattgaccaagaacactaaagagtcaacataatgtagctaaagggcaggaggaggtggggagaaggtaggcagtggtttgggcagataattgcatgggtttctagatagcacagcatagagtagacatacaaattcctgaaccaactgcttttgctgcagaggaaacaatctgatagaggtccaagaatcttatgtgagctaactggtgcaagactggttcataaagcctaggagagatgccttttctttgtccagaacacagacatcaacacaaatctatgaatataaagagccaggtaaggatgttccacagatagaaataagcaaagtttctataaaataacctggctgtgtgtagattttagctaccccactttatgctctgggtgggcagcagttcacacatagacacacacacacacacacacacacacacagagagagagagagagagagagagagagagagagagagagagagagagagcagtaaatttatctcctgctgctactgcattctattcttctacccaaatcctcctgattctctcttgagtcctatccttgaaactctcagggttctggcctatgcccaaccattggccactggcatctttattgatagatcaaacactaattggggacaaggaccttcagcatctggacactcagattcaaagaatagcaccaatctccaacataaccctcatagagtggggttatctaatttattgggcaaaattgcaaataagttttcactaagaggctcagcacagttaatagagcaattccaaaggaaacaaagaacaggcaatgcgtaaatacacgtgtttggcacatgcttgctgtctaaacgtctttggaaagagatgaggaaccactgagcacaggggtctgatcagtacccccatctaagaacatcaatttctgtatccctttgacaaatgaagagataagagagcatggataatacatataatagaatagcatgtagcttcgaaatagttcttccctacacagaacatagacaaactgagacttcattctttgctgagtgaaaatggtgaatcacaggtcagatcctacatagtctcacactaatacccaatcacaatctggaaaagttattgatgctggagcaggaaaggtagactcgatggtcaatgagccctaagccaggaggacatgaatgagctctaaccatctcctgtgcgaccaggctccggtcatctacagacatggccactggagaagtttataagcatcttgatttcagtgtccgtgcactcaatacaattagaaaaaaaaaagggggggggggacagaagaattgtaatatactttcttgaagcaccatttaatttctcaaaatggggcaatttcttaagtttctttatatgcgtgggtaacaacagcccacttataatttttgaggtccattacaattgacaaatatattacagagaaactctagtacatctttgtcctaagtgcttgaaaaaacaggctgattctaccccatgtccccttttcagttctgctttatatttataaaggcatagaagccagtctcatcttctttcctattttcatagccagacaatcaatttacctggagggttgcatgtcatctttgggggacaaggacagctactgtgattagccattgagaccacaaaacatctcaacttctccctcagatctgtgagaatgaaggactgaaaatgagtccaatatagacaaacagtaaggacttcagaagacttagctgtgggaatggagggaagaaaatgtcatcctctcagtgtattctccttcgagatgttttccattctttgattttattattctatcgttcacgatcatggaggaagcagaagagtttctctggatcattgtaggtggtgatggatagatgctgacatgattgtgaggcggtaacacgtcactgtgcgtatgcagctcccactgggctacgggtagagtgtatgagtggatcagagcacgatttccctttccactgtgtctcaagagaaaacactgcacagcaaaatagatggaagcaaacaagatggttaaaagaaggaatttagataaaatagattaaggtggggcatggttaaaagcaagatgattcacttaaccaaattgtaaaagagagaaagaaaggttgttatatcttaggtttcctacatcattttcctgagatactttttcactttagttacaattttaagactacagaataaaatagttagcaaatacatggttatgtgaatcataaacacaaagtttaatatttcatttcattttccaaaccaacactctaaattcctgcgatcagatgagttgatggtagaaactctcctctagtaaaaggagatggctccaaaacactccatgcattaaatggaattatcaagcaaacatatatgtattctgaagaaaatgcattttgaaattatcagtaacaaagttagcaccatgtagtttatgcacagaagtgctaacaattgctataatgcaaaaaaattcacatgcactgaaaattttatacatataaacaggagggcaacataccacacacacacaaagtcatacacaaaatcacagagtgagagagagagagagagagagactttgtttgcattagtctttaaattaaagaatctgaattaaccataaaattaaccataaattctatctcacttctacaatttcctaagtctcttaaaaggagatcataaagattcttaggacaaagagacatttcaactcttgcttttctgaactcttatttgttgagtaaaatagagaaccagaaacaccccgaagtcaccctgctggggtgtatttcgatctcttaggaatgattttctgttctgttcatttctctattctatgtcgtgtataggctctgcctagagggtaagaattaccagcggtctctgttcttgttttagtcaaggccatgtaagatgatggataaggtgtttagatcagcagtctcaccaactgcccttgaaaactcaagcaaatggatgacatcacatttcattacctgaccctgatgaggcatggcatttataacgggaacagaaatgccagtgtaattgaagagctttgaaacccccctttaaggcaaggtgacgaattaaccattgatttaatctcagaaaagaagatggagaaataacacaggagggagtggatttcacatgcagcctattccaaaggctctaacctcacggttttcaaatggcacatgcatagttgtgtgaatggactgacactggtagttatgaccaaatgaatacactcaaaggtcttcattggatctcattaaattcggtgagtgggagagaagaagatgagaagattgcaaagcagagggtacccatgcctgtcgctgcctatattcctgctaattgtgagctatacagacaagtgattttctgagttttgcacggagtgagactgcacagtggcatgaactgtggagctaggcaggttggttttctccccatctgggtgaacttacagaaactattttaaatatctttttcttatttttttctcaatcacaaaaataaaagacaatgaaaacgttttcatagaatcttttcaaagatgagatgaatcgatatcgcattcttgaacatttttctctagaaaatagctccccacaaatgttaattgttatggatgcaacattttcatatgaatactattttctgagtaaggaattgattttgcttttatgaatgtagaagaaagtacaaagaacaaaattaccttttgatattatctcatttattctgggcaatcattttttttcaacactttgcattcattgagtcccttaatttgttaatcaatcatatatcctagatacagtttttatgtgcattttcacaagacaggaaaatcagtctgccctctgatacctatacccttgaaaagaggcataatatgtaattctatatgttatgtataattcttcttctaaatgcctttctatacatgaagtactaacactgtatagagtcatattttgccatagctcaagggaactatgtcctgctgacccctattccattagaccacaaagtaaacagagtattgatctgtgacattcatctgtcagagttcacactccttgagaacaatgccttgtaaaatgctggccctggggatggcattccctttggaatcccgtccttatccttctgtgtgtatctctcatgggactcttaaaatgctttcctgctcatctatcaattgttttattgaatacttctacaacaggcattacttgaggtatggtgactaagtggtaaacagggtaacagagtccctgcctttatggaacttttaagtctttgcagcaaagaaacatagttgttaataatcacatatgaaggcttaggggtttagcccatttaattatccactgaggactcaccccacgtacacctcttcagagagaatgaaaagttgtcattcttgggaatgaagattaaataatgaaagaggggggtatgaggaaaggaacgacaacagaatgggaagatttccaaagaaaggaaatcaaatacttttatacatttttcccagtatactcactgttttcattatcgttgacttgaaaggacttttctcatatactacaattttattacttggtaataaaaagtataaatattctatcttcaaattattttatctagtgataaaatcaattgtaattttaaatataataaaattatatcatcaaatttttggaagaaaagtttctttatccttcttcttgttcttctctgctttctcctttcctgcttccttctctcccccactctatccacacgcatccatcacactacatgataaaaatgtcatgaactatggtaatgtttgtttctgatgataagagtttattggcggtggtttatctttgtgcttttttttctatgtaaattactaatagtaaatgtcagcttttcgaaaaagtgaattttcttaagaaagagattgagtggcaggagcgatatcccaatggttaggtgcacttggggtgagccttcagtggataattaaatcatgttattaatggtttgcttgaaccagttcagggtttgtcagcatgggaggttttcatactgtttcacctgttaattgtttgggaaatttatgagttatcaaaaaagtcactattttaaattaaaatagttaagtctaaaattaattaaaagtaaaagaagggaagcaatgctcatccatcccccctaatgcaacacttactgcaaggacacagggtcagctctcaccacccacatggcagggagtgattgtctgtaactgcagacactgcagtcagggtgtgtgacatcctcttctggcctacgtgggcacacacgggtcaggtacatgcatgtgcaagactcacacacacaatgtaaaaaaaaaaatcaacttttcttagctgaaatgaatgcttggaaatggttgttagagaagacccacttaaaagagatcttagagaattaaagatgctacagataaaaatgcatatctatctgtatataatgcaggtagatacgttttatctctatgtgtgtatagagaatgtatagcgtctatccctatgtacagagttccacatagatggagctctaactgaattttgagttttcctgatgaaacagtttgctgctttcccaagataggcagaaatagcagctatagagaaatatatattacagctggggacagaattttcagggggcatcacgtgcccattgtaattaagctcacgaggatgtgtgctctaaaagtggtcttccatgtgatacccggggtggcttctcttgtatttgggctatttcccttgaagcagcttcagtccttaagtcctgcagtctctgtagcttagtcatgccctctctctgcctgtggggggcgggtgggggggatcttttcagtctgcgcgcttggtctgtcaacacgggaggttttcataatgtgtttctttgatcatttatccttttcattgattggtttgctttctttgtttcctggaatattagttggaatgtaagacctttaaaatagtttacctttccaatcatattttgtttctccctttaaaacggtctatggttcagaaacatccatcatttgtatactagcgcctccattgaataatttgttttgaaaagcctacgagtattcattggctcctccctgttctaagattggtgcgttggttgtgacatctttttttgtttcttctgttttacaaagcaatatgttaactccctcataaaatagtcattacaagaatatataatcatattgtttttacatcttcaatattatctgtgtatcatctagggttgtattatcttgttcatgttcttaggcctgtctatgcttaggttatctttttccagctctctcatgaggcacacttatctttctattcaaggttaaggaattcagaactaagtctgtggtatgcagtttgctctagagtgatgggaactatttgactaggggactgtacatggggaatcattttatatggagttacgattttttaatctttatttattttagcaaagtttttgctttcagttaaacatcctcaaatatttcttattgcaggaagacctgaacagagtattgtgaatgctgcagaggacagtaggtatttctacatatagaaaattgtaggtttaatgctgagtgttagatccccatgtcctgatacctcatcttcctgacttatttacacttggcatgccagagccctaagcctttctggttgttgaaggtaatctctcccctcctttccccatccccacccctctcactacactttctcgttttctcctattctagatactccatgtgtctttagtacctctgttgaaatcttttattctctgaggaccctcatcaagctctttcctactatcatagctttgcactcctgcccctttctactcaggagcatgtgaggaataaatatatacgagcaggttagcggaaagaggagaagccactctaggtgtttcacagacttcaggaccctatgacacaggaaatgagaagtctagcaaattgcaagaccttggagttaaatgaccagggaagctgcaattcaactaactccttttagagatgtttgttcactcattcgtttgttttattttgtttggcttgagctttttttttttttttttaatctttctggatttttgcttacatattgtttttcaatgttctatttatgtggtgtgtgtgtgtgtgtgtgtgtgtgtgtgtgtacttgcacatgttttttatgcctttgttttgttttgttttattcttgtttatttgtccgtttgatttcttgagagagagtggggaggtagaaaaaaaagaaagaaagaaagaaagcgcaaagaccacagatggccaccactgtagttctaaggtgctcaaaaacccaaatgaggcaattctcagtaaaatatgaaatatttcacacttttagccaataccatgaatacataatcatagtgtcatgtagaataatcttttgttgttgttgttgtttagtttctgaggcagggtcttgctatctagctcaaatgggctataactcacaaccctggatcacagtttcccaaatattaggattatatatgtgcaccatcacacctggctgagaaatcacatctacacagaaaacctacatgccaataccaaataggcagagcttcccatttcatggaacttgggagtttcctgcagaaaccagcactaagccttaaaagaggtaacacacctgtctatagagcaagtgcagagtgagcacaagcgcttcagcttgtgtaactatccagacatctagaagagtacatgactttgatttgttgggttttgttgttgttgttctttggaatatatatatatatatatatatatatatatatatatatatacatatatatatacacacatacatacatatatatacacatgtacatatgtgtatatatacacacatatacatatatatatacatatgtacatatgtgtatatatacacatatacatatgtacatatgtgtatatatacatgtatatacatgtatatatatacatatacatacatatatatatatgtatatgtatatatatacatctccagacttctagaacaataaataattgatttgttggagattttttttctattgttgttgttggttggttggtttattatgtaaaattggacagaagagttctcatatggtgtcatcatactttatatcttctatgattggtgataacctttctttttaaaaataatttagaatgttatgaaagaacaagagactggcaatatccgctgtctctttactgtattttaacgctacgcttgcacatcattatgggggcgttgtaacttcacaatcttccttttatcagctctcacttagctttattccatgaaagagctccttacagaaatacctccagcagcgtttagcttcatttcatctctgcttccccaggagacaagttaagaacatagatcacaagttctgaggatattactttcatttatatctttataaatttagatagacaattttataacaacagtgctaaaaatctgaaacaaaaggggtcgcatgtgtacggcataaatcacccttatggggatgttataatttaactctgaaggcattgcttctttctgttttcattattttggtttgagaggctgctttcaaaataacagtttcttcccgcaagacaaaaccaggatatcatatacaaagtaccgagagagcctgggtttcgtgtgctgcctattccagtcctccttggaggttttgatgagttcactgggaggaaaataagaacaagtcaaaattctcagacctttagttatagattcagggtgcaagaaaatctcactttccatttagaagccaggcttcaggcgctggaaagatggctcggcagatgagattgcttttttgcacttctgaagacccaagtgtggttcctagcacctacatcaggaagctcacaggcagcgccataggatctggcgtcctcttctggtcactttggacccctgcatacgtgtctgtacttacacatacacacagaaacattaaaaataaataaatctttaaaaatatcagaactttataatgagaatctgttgatgacacaaaacaaatttcattgtggtaatttacctatgtgcatatgatgcactttgaccgtaattctccctcattaccttcttttacatcccgaccttctctgctggtacccgactcaacagtctctctcttactttcatgcctttctttttaaagtctaggttcttcgtatgaaagaaaacactacacttgcctttctgaatctggtgtatttcaccaagtttaaaaatctcaaattcaatcttttcctgaaaagaaaaaaaaaagacataatttcattcttcttcatggttgaacaaaattgcattgaatttcacttttaaaaatacttcctttaaatgttcatttctgatactttcctttttccaaagggcttgatgaaactcagggtcatcatgatgtattttcttacaacttttgtgctttaaacaggaactagaacaataataacagtgaaaaaaatgcaatactagattttggaaagtctgattaagtctcttcccaagggtgagtcaagcttacacaagcaaacactggagaaacactagaagtaggaatctggcattgcatttatataaattaatcacctagctcaatatttacagagagttgagcactgaggtactcccagtcacaagaagccaacttggaaatacacagagtgatttgatggctcagcagggctggtggggagtaaggggtagacattagaggagatgttttggaagaaaatggtggaaatattaatgtacaagggagatctgtgcagatgtcatttttccatgactgagtatggtggctctccacctttgtaatgctgtgacatgttcttcatgttgtggtgacaccccacacacacacacctataaaattatttgcattgctacttcataactctaactttgctgtaatgaatgataatgcaaatatctgtgttttccagtggtcttagaaggcccctgtgaaagggtcactcagctccttagagggtctcgtgacccacaggctaagaactggggttttagtgctctctgtacacatgtcttcccatgttcctatgtggctgacatgtgtgacttcagaggaagattggctcaccccagtgtttggatttggcaaaccctttcatatttcacctttagatatttgctgcatggctacctgtctttgcattttgaaaatgaaaatcctgttcctcttggctttgtgtagctttgtctctcattatctgaatgtctctaagtttacaatttcttccctgcagtttgggttcgccacatcaagttgggatttaattacatgcctaagtaatgaaagagcaccacactttcctcttccttcatatgagacttaaatgccaactctaaaactttttttttatatgtgagacaaattttcagtatctggggttgttaaatattggactagctttcttagtacgatattaaatgttccatcggaaggcgtcttcagttagataactgcttatcttgaaaaaatttaatgtaagtgaacttggaagtagaaaatcataatagcatcaaactagatatggtgtctgtgtatatgtgtgtgtgtgcatgtgtaggtgtatgtgtgtgtgagtatgaatatgaatatacactatttagacatattagtttagatgtgcaaaattgtaattattaaagaaactatcatcacaatttcatatataataagtggtgaaaaggacaccttacttaaaataagaatgaaaatcaggaccaaaaggcaatgttggttgcctaagatatataatagaacctagaactttggccccttgccatatatataaataccatacaacatacatacatacatacatacatacatacacatatacacacatgggtaggggtaagggtagaaatagagaagtattttcaataacatggagtccaggatcaagaaaagagaaaagatcattcaagacctatctgtggtctctgcctctcactctaagaagcctgtgctgccttccttgcacttttgtttgcacggtcccctgtgcacaagcacactgacctctgtggtcggaggtgcgttttgcacactgaccgctgtggtcaggggtgccttctgacagaatggcttgtagagtttgcttccttcttctcttcttttcacggtctaacaggcatctatctaacaagcattagagatggtgtcagtagagaccagttgggtgtgagatagataatggggcttcttcaatgggcttcttcaagggaaagctgatgtcttatgtacaatgaggaaagcatgtgatctttttacatattcatacatagctcagagagttttatgagcttttctgatgtgatctttacccagtcttctgctcagaagagacaaagcgtaatgtgcaggccctggcagctctgctgtgccagtcttattaggaaacgggcacacatccaacttcatgcatcctgtcattcatgctcatttcttttcattttctggttttctttttctttcttgcccctgccttgcctttcacctttgaccttgtgaggttggtgctgcagtggtctggctcttgaactgtccttccttcgactattgttttttctaagtgattttttttctgtctttgtattaccaactatccctggttcctctatcttgtggtgtagacagattatgagatggaggttaagagcacagtcgccacactccagacacctggctttgaaccctggttcagcttcttaccaattggggcacccagggcaagtcactgaacttcactctcttaagactttctgtgtgagtaataatattttcaatagattcgtttctatggcaataaagtgcgataatatgttatggtacttaggcaagtttcctaatacatatcccctcacacccacagagatatgcatacatatatgcatacatacatacatgtatacatacatacatgcatacatacacacatacatgcatacatacatgcatgcatacatacatacatgcatgcatacatacatacatacatgcatacatacatacatacatgcatgcatacatacatacatacatgcatacatacatacatacatgcacacatacatatatgcatacatacatgcatgcatacatacatacatgcatgcatacatacatacatgcatgcatacatacatacatgcacacatacatatatgcatacatacatacatgcatacatacatacagttcacactaatggtcatgccagggtatacatttcccagggaagccttgatatttcatctataatatttagtgtataccttaatgatttaatgctaaaaaatagagtcggttgcttgaaacaaatttttctaattatatatgtttggctttaagaaaaaaaaatctatgaggaaatcaactacagagaatgcctaacccttagagaaaattagccagcccagatccctcttacttctctatgagcccagacatctgtgtaagcttgtcttttttttttttttttttttttctggaagcctggagatttaatgaggcaggaaagagaagaaaagtgactgtgtgtcaacagagacttcgtttgtcaacaaatgaggtgtgtgtgtgtgtgtgtgtgtgtgtgtgtgtgtgtgttcatgctattatttttctttatctagtgaacttaacaaatagtcacaattcaccagctaaggtgcagtataccgcagcaatcaagataagtcaaatggcttgtagtttgctgggccccgccctctagaagctaccagtgcccacctgctagactgtgtgcagtgtgaagcaggtggccgtgcaggttgacaccattgatcttagtgatgtactagcagttgaaccttcttccagcctgtgttaatgacctcacagctgttattgtttactgtttgttctgttgtttcttgctgtctgtgaaaagctcagctgtctggacactttatgacaagaaataaactttggaatttcctgggtgatctcttagacatacactgattcctgattccctcccctgatgcttgtttgggtttgggtttggttcttgtttgtttgtttgttttggattttttgggtcagtttgtttttcctgtaggcagaaatatctaggtaaaagatcacatgcttatatctagacaacaaataaaatggacacatataggcaccctttagcttttaattaaactccttgcaaagttaccattgatccatgcctcacagtcgaatgtaaagggtctcttattgcctgagaggattatctctgctttgctttatatgggacctgtgctagaccgatgtgacaagagtaaataattgtttttggttttttcacccagggggaaaaatggggagtctagaaaatagtgcaataaaactgctgcagaaccttgattatacctataaagtcacagaaatcaaccaacccataggaacatacgcagcagttttactcatgatccattgagggatggagcccatttttgtagaccaaatattttcagagattttgacagtccttgcttctccaaatgaaattccggtacttcctgccttagaagtgggtcctcctgtgagagcgagcaccatggtagatgaattgggagtcagtgaggctcttgtacatctgtgtctcgggcagccgaaaccatttaactattgcactgatagagagcagagtgttttctttttctcagcagagttataaaaggatcccatttgatcgaattattggaatcttcaaagagcagtgcccccaggctttgaaacagtgctgactgcatatattttatagtaaggaggacaagtgtatacatttgctgtaaccaaagagttaatattttaccaactgactaatgtaatacttaaatgcactttgtgaagtgaaaaaaattgttatatggtaacatcagggtttcttggttacttgttttatgtgtatgcatacatatacacctactatcaattatgtgtgtaggtcataattggtcattttgttttaaaatgcctcctgccaagaatgcatatggttagagatatggagttcattatatgtgctatgcagctctaggtggtagctctggctggtagtggatcatgaacaagcagaaggtaactcttaggagtgaagtgtgtaacagagactgtagggtcacctagcctgagaaaatataattctacacctatacaccaatagatgacgtctctctccaatgtgtactcagaaagaataatgggagaaaaggaagacaggaaactgtgctattgcagttcagccctaggaaacaccactcgtggctggcaatataacggccactggaccgttctatacagtgacacaaaccataaaaagagatagtgcttctgctgaggtgagttataagtcattatttttgaaaatatcaaaagagaattttgcttagacgctaataaaaccttggcttgtagccagtggaagctgcagagagagaaatgcatccagcatatctggtacttataaaattgaaagcatttcttcccacaaaacaaaattgggaagattcccaaggcaatgtctccggcttggtaaatagagtggatggggattctaaagcctatttctaaataaatgataaaaatagatcacaatataatcagactttattttgacggcaaactgtgttcaagaatgttaagtggaaaagtgtcaacgtcacttgtggggtcacaggccctgtttgtttgtttccattcaaaggagaatgcaaggaacccaaggacaatagcagaagttccttgcatggtctgttacagcctcgccactgagggaaaggccttacctactcttttcctttaaatattttttttcaaacaaaatattttgatcatgttttccctccccagttactcccacatcctccctatatccataaacacccaactttatgttcctccttactcttttgaaaagaggaaaactcaaaaacagacaaaccaaccatttaagccacagagaagggggaggaggagagaggggcagtgaaggaggaggagggagaagaggaaccattgtctgttttgtattggccaactatgcctgagcatggggcctgtccaggattgcttaggagtgggagtgtgttttaaattccccttctcagtactgggatttctgtctgccttgaacctgcgcactccttgtgtgtagtaaggccttaccttctgataaaattaaaaaccatcttagagccaagaaattataaattgatactttggtgtagattaaagtatgagattatattaatcaaacacacacacacacacacacacacacacacacacacacacacacacacacaatacaaaactgaagatgtggggagatataggtcaaatgataaaataaagcaggcaaatgggatagactagcctgggatcaaactatacttaacaatactatattatattctttccttgtttggtaattggtagttcactagccataaggagaccatgtaaaatgagggatattatcggttatacaactgaagtcttgatctcatttatatagtgtgtttatgtataagtacttcttatgacaccatgctgcatacttcaaatatccaccacaggatttactttgaaatgcataggaatgtatttaaataagtaaagaggagaagtgggatgtatagagcatggaattgctgcttaaaactcatggcccgtcagaccattgggaaacctccccaggattctctgcacagatgccttcctggatcctatacctcaattttgttattccaaacccaacatattatcactcaaaacacagaccactaaatcctaagagataggcacttgatacatatgacctttaagaaaaaattccacgtatttgatgtatcactttgatatatttcaaaactctactcttattacttttatagcataaaatatcatttttattgactcaaaacatacagaagactaataaaaatgaagtcatcttaatatctttcagtagtttcagaaatcactaagagtttttaaagcataataaagttgactgcctatgatctatatttaaggacaagatttgatttcttcattgaaaagcactacatacaaattaatcaggagtctcatgcttttataacataattatttaaatatttttagactaatttgtctttcctggccttataaacctctattatagcagagagcagctcgctttttcttgccttgaattttcattgatatgactcagtgattggcacataaatatttataggatcagtgactgagagaagcagtggagcatttgattccaaactaaaatgggtaatttataaatatcagtgagagttgattatacataaatgaaataatctataattgaagctgaaattaacaagaacgtgcatgaaccctaaagtgattgtccagtcctaatgctaaccgattaaagggtgatcttccttttacttccctgggatgctgtggaaatgtcttagggaaaagtcttcaagtggctttgttgctctatgctttatatatccactaaaggtgaaagtataggagctaaccactttaacacattcattacctgtacataatctttgctgattgcctgaacttttaaatttcttaaatagtagcttattatctctctgcttgtccacaccaaatagtgttaaacatttacactttgccttgacttcgtttgtgatagaaagccatatggccgtccaccctatctgatataacaagcacatagttaattgatgcaagcgcagttcttctgatttttgatagcatcttacacgggagaccattcttgcaatcagatatgacgatgctgtttactataagataaatatctattaagagtattcattgagattttatattttcttctgcccttactgctcccagtgagaccatgaatcggatcctaaggccattaatgaacaaacactaactagcctgagtctgctatagaacttgaagtgtccaaggcaggcttcagtcctgggtctaactcactcccagcaatagatgaatcagtccttggaggacatgaaggaacctctgaaagaacagtgatcacttttttcttttctttttttctcttcttttcttttttctttttttaaagaatataaattttaaactacctgtcagggtattgtcaaagaaattcagtgttatcactccctcttcaatacacacatggagattttcaggaagcagtgaatgaattattagaggaacaatcaatgtcagcttaccatctcagcagccatcctgattctgttcatgggattcactctggcaatggattgctcacatactttcccttttctgatgtaacgactaccacatgtcaggggaccgcacattgctaaaatgaggaaacaaaccttgcccctcagtgtagcttggtcagaggatccttcgcgggtgtgttcacgagtgcacatttcagccttaggctacttaatctcatcattgcatgctggtttatatattttgagttatgtctacttgattatctggcaactgatttcttacatttatctttttttttcagaaacttaagtataaaatcaatcctgtcacatgtatatatttgtggtgttttagataataatgaagaactatggctataatagtcacataaaattgttattttgaagctagtcagtcattgctttttatttggtatctaacgtctatatgcttaaaaaactgtgagaagcacatttaacttcttttgttgcgtgacttctagattcaatgtttgaatcttctgggaacattccagtggtagaaaagccagggctagggatattaagatggtcaatgattttcttgtgctaagccctgagcttgatatcatattcttaggagggtcccacatggtgtctctgagactggctgcaataattttatttgaatcaaatgaatgagcccctggcctccttcatcctcccaagagctcacttggtcattggacataataatggaaccctctcagtctgggagacaggatggcttcactttgacctttatcactaagaataagcccagagcaatgttttcaaaatggtattttaaaattactgcactgagagtcatattggttttttgtttcttccatgtctgtggatttcattattatttcagattttaagtcagacgagctaacactggatggaaggattttaccatcacagggcttggttctgtcttcaatgtgatgtatacactgacaagtcagaaaaacaaaatgatcaataatataaccattaggagataaaagtaaggaataaattccataatgtgtgtgagatgcttcagggagaggctgcctcagtaagctaactctaagactggtcaggatgcaagaccatggacagcattaccttgataactactttcaagtgtgcaactcttttgatctagctgaaggacagtttttaactaagagacctaaaagaatataaccagagtccagtcaagtcatttactacctggggggtataatttttttgcacataaatatcactcatctttattgccacactatgtaaagagagacaatctattctggctagttaatgatgctaaactgagtagtgtaatgaataacatagtatatgtagaatagcacagaatatgataaatagtattataaattatttttagttacccaacattgagtgaataatgatccctgagaagatgttcatatcctagttcctagaacctatgaatatgaaaacttctatagacactgttgtttagataagtatgctttactgtctgaatgctaaagatttgatccccaaaatggtactactagaagaaggaataaacgtctggtgagaaacttttcaggcatggaggatatgacccactatcagggagtagaattccagtctgttttcttttctgtctctcactcccttggcacaggatgagttgtttgtgcttctactgtgatgccccagctgatgcaaacccaaatgtagtaggacagtagatcattgacagaaacctccaaaaccatgaactaacataaaccctgcattagctgactatctcatatatttgtacttcggttcaaagcttcggttcaaaacagcattacaaaatgaactaatttaactatctctatgtagagagattcactttgattgtccagtgagaagaagatattttatgatcacaaggacaagagaaagaggtaagaaaataaggcccaagatggaaacatgacaacacatgtcaaaattgtgttgatgtgcttaactacggactgctggtgacctgcagaacctgtaggacaatagggacgaagcctcctcactagagtctctacaaagaatcaattctgtggcatatggattttagcccacaagactaatttaggcaactgactcctgaacactaaggtaataagtttgtggtgtttcaagccactgagtttgtttgtggcaattggttataggagcaacaggatatcgtacatgcccagcccacgatgccatgatgcactctttaccagctgcagaagttgcatccattgatggcttcttgactttgcatgcatgttcccctacctccttctgaattctgatattattacttttctcacctcttctccacactcaaaattccttcatatcccatgggtggaggttgagggagaagaagaagaagaagaagaagaagaagaagaagaagaagaagaagaagaagaagaagaagaagaagaagaagaagaagaagaagaagaacaagaacaagaagaagaacaagaacaagaagaacaagaagaagaagaacaagaagaagaagnnnnnnnnnnnnnnnnnnnnnnnnnnnnnnnnnnnnnnnnnnnnnnnnnnnnnnnnnnnnnnnnnnnnnnnnnnnnnnnnnnnnnnnnnnnnnnnnnnnnnnnnnnnnnnnnnnnnnnnnnnnnnnnnnnnnnnnnnnnnnnnnnnnnnnnnnnnnnnnnnnnnnnnnnnnnnnnnnnnnnnnnnnnnnnnnnnnnnnnnnnnnnnnnnnnnnnnnnnnnnnnnnnnnnnnnnnnnnnnnnnnnnnnnnnnnnnnnnnnnnnnnnnnnnnnnnnnnnnnnnnnnnnnnnnnnnnnnnnnnnnnnnnnnnnnnnnnnnnnnnnnnnnnnnnnnnnnnnnnnnnnnnnnnnnnnnnnnnnnnnnnnnnnnnnnnnnnnnnnnnnnnnnnnnnnnnnnnnnnnnnnnnnnnnnnnnnnnnnnnnnnnnnnnnnnnnnnnnnnnnnnngcagggagggagggagggaaaagaaaagaagggagagagaaagagaggcaggaaagaaaggaatgaagaaagaaaaagaaagaagaaaggaaggaaaggatggaaggaaggaagaaagaaagaaggaatctggtgagatggtggaaaagtcaagagcacatactatgcttcttgaacacgtgttcatttcccaccacccatgtcaagaagctaatagccacctgtgacttcaggtctagaggtctcgactctttttggattctctgtgtgcctacactcatgtacagaaaaacacaccttataataataataataataataataataataataataataataataataataaatcatcttttttaaaaaataagaaaaggatctaagattccttaaaaacgttgtggtccttctcttctataacacatgagaagggtcctgctcacagcatgatttccttatagctcatctaagaatcataccttagaaagattttatcgggggaaaaaaaaaccacaactagaaattcagcttctgcttccctcatgtctgttgccaggttcctctctgtgcttcgctttcaccaaaccgagctagaagtcatgatgagccccatagatgagctagaagtcatgatgggtccctactgtttagtaggtggagcttatggaatccttggaagagggggagggagaattgtatgagccagaggggccaaggacacaagcagagcaagaaccacaaaattaacaaggcggggctcgtaggggctcacagagacccaagagtccattacagaactcgcatgggactgcagtagatcttctgcacatgtatgctgtgatggtttaacttggagcttttttgaaactcctaagagtaggagtaaggatatctctgactcttttgtttggtcttggtacacttttcctcctactgggttcctcatctagccttgatatgagggtttgtgtctggtcttatttgttattctgggttaggctgatacccctgaaagacctgctcttcttcaaaggaaaacaagaatagcagtggatctggaggaaagggaagatggggagagggaaggggagagactgggaggagtggagggggggctgcagtcaggttgcattgtatgagagaagaataaaagaaaaataaaacaaaagaaatcttgatgaaagctgtgttaattcttgcacttgtccatgtgatgttacagttcttctctctaaaaacgttcccatccattttaatatgctaagtgggcagaatagctctcttatcacagtgtcatctggagggaggggtatataaaaataattaagatggaggttaacagcaaaggttgatggcaacatttggcatttagcactaagactgtagaggtagctaacattattcaggcaggtttttctgatatgataaagatgcacactttaagaatcacttctgcagaatgtctcctttgaatccctcaattatgaaggtgataggataaacacacatcttccttcttggggaactatcaacagtggcttttggtgagaatgctgaagttttttgccttgaaattcccaatttcaatgctcttcaaactaagaaagatcatctatgaggtaattataagaaatgaagtgctgaagagttttatataccatttcatcatacaagtaaatgttgaccagacctggcaattgaataacagctttaattattagaagaacagaaatgatagactatacagtagagatagagatttactagaaaggtttgcagacgtgatacagaaaatggaggctgcttttgcctaatattcctgtatcactagtctacctgatgagtggtcctctcattttcagagaagggcttctcccactattagtccttcctagaaatgtccttacagaccaacccagaggcatgcctcttagttgattctaggtcccattttcttggccatcaagattagccattactatctcgaagtggctatttgtcctgagtggcttctcagaagagaccgttgctaatggaaagatagtttatttgatgctgacagccataacttgaccacacaaaaagactacatttttttcttttgatagattccttactttagttttaagttaaattacatgtgttgagttcctagatttgtatatgtgcatccatgttactgtcctctgtttattcaagtgcttcagggaagcttctaacccctgtgttcatatatatcttagactgataaccggacacccaatactgtttaaaacataaataattatggagggttaaattgagttgagcacatttatttcaaatattaattaattaattaattaattaatacttattctcaagttgtcacaaataacaggattttgggctttttaatataatgattgaagagtgtcctgtggtgtacatacaccaaaatttttaacagactcatcagtcaataaacaattaaattgttttccttttcggctactacaaaaattgctgagacgagcaaggctcacgttgcttttacaccgtggctccatttttttctagtaattcacagagtagaattgtgagatcattttacattaaaaactcacccctgtccgggctgaggccatgcctcatttgctaagatgcctgggacaaagcaaaagtctgaatgcacagaagccatgtcacaagctggacacggtgctcagtccatgtaaccttagctgtggtgaggggtgacagtggccagcagatccctggctacattgtccagcacatctgctaaaccaatgggcttcaggctcactgagaaaccccatctcaaacacatgaataaataaaggtggagagtccctgaggaagggcaccttacaccaaactctgccctctgcagacatgtgcacatgcacagaactacacttacagatatatacatcccaccatgcacatacacacacacagtaaaatttaccatgttaattagacaaaatcatgggtttcctcatgatattttaatacacaagtgtacattgatcatattcactcctattagcctctttttttccctccccaactggcctctttctgtctttaatgttttttagcaaactgttatgctagcttccatggcaacacttttttgtattaccaacagcatacaacaattccattctctccacatccccaaagaccttcatagcatgagtcttcttgatgccagtcactcctacttgactgagtcactgtggtcttaattctattcctagatggttagtgttgtcgagttttgtttgttactggacatttgcatgccttctttttgacaattgtttattaagatcgattgcccagtttttaattggaccatttttgttttgatactaagtctggggaatttctcatatattctttatatcaaggctgcttcaaacacacatacaacatatgtatgttacatatgtccctatatataaagaaatttatatattataaaaaagtttttttaaaggactgcagttcttcatcttttgtgatatgttgtattgcactgactatatttcctctttcttaggagttctgtattgaaacagtttctcatgtacatttaacatctctgttttacagcattatctcctttttataaaagaatgctggacatgtgacagagggaaagaaagcatgggtttttgacaactactctgcaaaaagaaaatcacaattgttttacatatattatcttattgaattctcacaacactccagcacagatttattaatattcccagaagaaatagaatttgaatacatggtctatgcaacctcaaggctcccaatgtgctttaaacacaagcaatgtatccctgcaataagtggaattaatacaaatctcttagcttgattagctttaaagtcgctcaggaaacagtatattgagatcagcagagaagttaagcaaatagtggtttaaatctagagaggagagcacagtggaagagatattatgttgccaatttcatcaaagtaaaaaacatgaattattcagtatggctctagatattgatcgagttaaatgaataaatgctaacttaccacattgtaaagatgatgagattcataatttcttcaataagtcattaattatacttcttacaatattcatttttcttaggcttagcctaatctataaggttttgttgccctttcatgagtaatggaattcctttattttaaaactctattaaaattatcatttataacattgcaataactgttcaatggtgaagtgattccataaagcccttcaggataatagctagagagtaaaactaagttcttgatagtcttataattttcatcaagctcactaatagtatattttataatatttcttatcatctgccttgaccattttgtcactagactgaaaattcatcatgttaagctataatggatatcatgttgtattatatttcattcttttatatgtttaacatctatcagtatttcaacagttaacttctcagaaatatctcacattttttaaaatttgtgattgtaatccttccttctgttcttccataagatcccccaagctctatccactgttggttgtgggtgtctgcttctgtctgacttagacctagacctccctgcacatatgtagcagatgtgcagctcagtctccgtgtgggtcctgaacaactggggctgaatctgtcacctctctgtgggatatggtcttctatctgagctgccttgtctacccttaatgggagaggatgtgcctagccttgcagagacctgatgtaccaggatgggggggtgcccaaaggggctctcacccactcagaagagaaggggattggagatgtgggaaagtatttgaagaaagggtgactggggggcaggaaagtgaatgagatgtaaggtgaattagtaaaatataaaaaaatgaaaaatagtaaaaatttaaaaaatatgtgatggcagtaaaaagctcactggtttagcggttgcttaaggaaatgattgatttaattgctgtgtgtaaatgcattattttcaagaagaagggttagtttactggaatccattttggttttcattcagactcaggtctcaaggaggatatatatatatatatatatatatatatatatatatgaattatcgctgagcattgcatgctgttaatctgaattctgcagttgcatgcaggcttgcagtgaggatccagcctcttttttgccttttttggccctgtgttttccaggctcttgttttgatttattttacaatagcaggatatgctgggagctgccatgattagaagggaaagggaggcaaatagcctctgttgtatttgatttcctttaaaaatctacttgcctgtgaaagaccttaaatatttttactaacaattaatgcttgtaaatgaagaggctccttctggtatctataagataaagcagaactctttcaaaaatggctggctaatgctctttaaccctccaccaggatatatttcatagatactggaactgccaaagaggatgtctgccacagaatggaaggaaacgtcctcttcagaagtgagacaaggagtctgaactgtttgctacatgttcttcagagtcttatagccatttcccccagaagtattgagtcttgggaggcaagaacgatgaataccatatgaaacatattgattttaaaatcatgcagctgtttaaagtttgatttataattacttactaagacaactgtataattttaatctcagcataagaataaaatactaatttatggttttcagtctatcagtcctaaacattaacctatactttcaacagtgtatgggttatggttattggagatatttttgtttatgtctttgtacatagaaattgattaaatcaattgctctcaactcttccaaaggctcttggcacttgtgaacgataatcagagggattatggtggctgatatgtaaggtctaagagattattgctgatatacctagatagatttgggatttgggggctttctaaattggaaatagtaatgaaaataaaagaaacaactgtgtcactgaaggcagtattgagacttatatatcaaaataatcacatacataactttatctctctacaactttgttccaccaagaaaaacccacacagctccttcatcattacatcaagctactgtgatgcaagtctgtctgtctgtctgtctgtctgtctgtttgttctgatgtctagatacatggtcttgccatgtatcctaggttgttctcttatgtttgatccttctgcccctgccttggctgttactgcatgtgtgcctcaccatgccaacctctgtatgaactattgagcagttaataaagaataaagaaattttcagttgaacaggaagtccttaaaaccagtgaggaaatggttggttactgacatgatctttgtgcccctattgtgccaatggctatgtccttgcagggccagcctttagtgtggctcgcagagttcacagatgagtaaggcttgtcgttcattttatcctctgtactttctagcactataaaagcaagttgttgaggatgaaacttccaggtgaacaccagcttgattttttatgattcggcgatgtggtaacttcagcaacaaggtcttactgtcaaattctagagggtaactgatagtgttggcagtagcctgcatcattgttactttgctgtagctatgataagatgctcttgacaaaagcaactcttagaggaatttacttggggatcatggattcagagaattaaaggctagaaactattcctggtactaaggcctggcctgtgactggagccatcatgaagccaacagtcgagtgagaggaagatagtagactagtaataagtaggtgatatctcagaaaataagtacaagggaagaaaagcagtactgttcccggaggactggggatatgaagtaggagagcagagaaacctccttataaagcaacatgttgagatgagcccttggtaaggaggatacagtcgtatagagagctcatcaacaacttagttgatcagaaaaacattacatgcataaaagcatgtaagattgaggaaagagatatgggtacaaaagaagaccaagaaaacataatacagagtgaaattaaaacagtgggtagggcccaggcagacagtataaaaagtgggttttgcattatattctacagcaaaccattaagggttttaaacaagaagatcaagtgatctgagatacggttttaagtggttttctcttcctgttgtatagaaagagggttccatggagaccagaataaaacttgaaaaaataacaggagtcttgtagctgttgagaagttgaccaaagaaggtcctatgaccttgttcgttgagatattcactcttctgtgtcatatgatttcagtaaaactaaaaaacaatacattttagtcagtaccactgaccatgtacttctgtgtcttggatagattttattcttaaaggtcaaattaatgaacttgtcaaaaggaactatatacttgacacctcagtactcgagaagcagaaaattggaagttcacagccgtaatcgataacatagtaagttttaggctagcctggtctacataataccttgtctcaaaaactaaaatatttttaaaagatgatgtatatagtgaatagcattcagagagaaggctggtgtcacaagtgtttgcatatccccatgttgtcaggtgtctccttcctgctaactcaccagtatacttatctacttgttcagtactgaatcagatgggtctctctcacactggttagtgttttgtccctgctgctggctgctgttacttaaccagtcacataaaaaatattcagaaagggtattttctattcttttctttcagacctggtaattgtatataagtaatataccaataggggtgtcatgatgaggttttcatacttgcatacggtgcaccaaattgtttacgtgctctattcctctccccctttctccacttcctgctgtgtccccggaactgcccatctaagtctcatgcccccgtcttcctttatgtatcttctccattttgtgaaatgcacacttttttgttccatgcattgcattatagcctttgtcacctgtgactacatcccatagttacgtttgatagctcaaactgaccctcgaatttccatttcctattatgattttcaacatcctgtatcaaaactatcagacgatttcctttcagtagtagatggagaatgtccagactttggagggaaatctcataactgaacaactccaatctgttacacctatagacaaataaaccaactcataatacctaggattttctctcactttataatactgtctgtaactgacatgagaataatctcttatgtgactgaaagaaaaaaccctccaactataagttcttttaaaaactaagaatctacatataatctaatattgcttaaaatttgtttataatcaatatactcctccccatttatctttaaattcacagcatctttttatattaacagtcatggcatggatatatgcataaacatatacattcctaaatacaaattgttcagtccacataatgttacttatatgtattttggggccttaccatttggcatggaataaccaattgaatggcatgctcaatatttcccatttcactgtacatgctaagaaaaaaaaaacaaattaaaaacaaaatttctttggggaagactcttaggaaatggaaagactttcagaataagtctatgtctgctttaaccatgattcttagaatgtggtgtagtatttggtttcagtggaagcttatacagctgtttggatgaatggacaaaatcacgtgttgttcttgtagagaggacattgtcttcgatgcatactgaggcacctcagggtttgcttagcatagattggaattcaacttgttttctcattcatattatgatatccaaaatgttaataattgtcatttttgccaactgtgtatatttgaaaacaacaacaaccaaaaccatctagctaggtgattttatgaacgcagctaacttatttttaaagtacatctttttatcgtaatatcatgtaaaatcaagatgatcttatttctatcactctgcccactcaattgcctcttcctgaatcagaaatcagaatccatgtgtnnnnnnnnnnnnnnnnnnnntacagcagtctctctctctacatcagtctctctctctctctctctctctctctctctctctctctctctctctctgtctctgtctgtctctctctctctctctctgtctctgtctgtctctctctctctctgtctctgtctgtctctctctctctctctctggagtacattcatcttcccatggaacttctgagctaatcttggtggtgcttcaggaacatgttttaaagtcattttgattatacttttgaaacgttgattataggaaaatttcactttcaccttttactttaaaatgttttttgaagtttttaaatggcatatcaatggtgatatggaactatttgacaatttttttctttcaacagatgtcaaatcaagctcatcctctttcacagagattaaaaacatattttacgtgagcatcaaagtgcactttgcacatttgttaccgaatgtcactgttcatttcattgggggactgagctatcatggattgaatccctctgatccagtccgtggttcaaggttgttaggaagtttcattttaaatccctcctactcatgcgcttttgctccaagcttgtatcctcatatcagtacttctaactgaaactataattctaagtgtacatacttacaaacattaaacagtgggggatacctttctttctgatgtcagagtctctagacttctatcttcatatgggcttcagttaatataggtaagcatgcttacatggtcacaaaaagaagaatagactcagcacatttgtgataggaaatggaacacatttgtgggagacaatcattagaggtttggagtgtatttagtaactagtgaaataaaaattccaatgtttaagaaaaccagctagtttgtgggaaaatagactggtgagccatcattgagagaaagccccaccctaagtacagaattattgtcgatgatgtttgtgattcaggtggtgtgtaagtgaactttcctttgataagatgcatagtaacacttggttcttccccagctttagattaccatacgtctccatttcttagcataggtggaaatttttaagaataattgagggagaaaaagaagacaaatggtgcttctatttcaagagaccttaccgttattgaagttagcaagcatactgtgcacagaactgccattgctaactatttctgtatagagtcagatttacttggactgagaggactgatcaagtacataagaaatttcaaggaaatccatgaatgcaggctgttcgtcttttaatgtaaaagagcaccaggtagttctcaacatccaggagagcacagaaaggtgtccaaatcaggaggcaagcaagttaatataagcacttgtataggaagagaaacaacaaatactcagagtaaatggcctatggggggaagagagtacaagtagaggtaaatattcttctggagtgtataaaattttgattaaataatatgcagatatctttgtgacgaaaagagaactagccctttgaagctgatgtttttggaaggtatgggcatggtctccaaattgccaggagttgtatcaggcagatatgatcaggtaccacagaaaatataaaacaagtcttttaaaggaagattgccattgcagtaagtaaggctcataatacagatgctaaagaatatgaaggaaggggaaagaggaatgggatgaggaacattgggagggaggaccaaaaagggtggacaaggactgtaatgtaaatatgaagaaattaagaaaatggttaaaatataaaaagagtgtaaggagagcagatcacagcagtcataaatattttagtgtcattactctatgtatagtatccataaaagttaggtgatttaatctccataaaatgcccatagaatgcctgacaattatcatctgtatttggataagcaagtcaagtcatggagagttcctatagacacatatggtatcaggatttaaagcccaagccttaaagaggtacccatttaaccattctgctatgctacctgcccaggctatagagaaagggacattcaatagagcatgactatgacaggtctacttataggcaggaatgggattatacatttgttgaagaatcagcatcagaaggagaacggggagagggctctggacaactcattgtgtgacttagaaggatttaagtagacaggttcccccttggtctgggaagaaatgccttcctatttagacacctagagaaacaaaagaggagcttccagagaatagtgtgactcagagtgatcaccagagtatatgctgggagtctgctaaggaggaaataagtaattaccaaacagcagttggtggctgacacaggatgacacttagagtaggggctgccagcttctcagctcagcttggagtctgggagcgcaggctgagcagacaatgctgagatagaaggggggctgttgattgcttagccaaggcaactggatgctctcaggggcttgtcctctatctctgtaatcgaaaaaggtaagactggcagaaagttgcagtaaaattggtccatgtaatttttattagcttatgattaaagagaagcattttaagatcttatctaaaagattataaaattttcgagtttaagcacactccatatcttcaattttccctcattccttccatggaaatatatttcattttataggaattcaataatccctgtgactttattgttatcaaagggattaaaagggacttcggaagttggtagagatggcagaggtatctatcagaagaaacttttcatgctgtttttaaagttaaccctttccagggagaatgaagccactgaaatatcttccaagcttttcagtcatcattctacacagccaaggtagacattttggcagaaatgcagctgggactttactgattgtaggcgtgtacttcagtgtgaattcttgccaaatacaaatacaacaatgggtcctaatgatacaacatataaatctctatgagcaccatacatttaacgaggatgcccccgttgcctcttccccttaggagaggaagaactatggttagactatgagataagagcacatatgcccaatcgatttagtattcttgatcctccataacaggagatccatacaatggagtgaaaaggtcacctcagcttttcattcagtctgctagtgagatcagtatgttagtagtcattatataaacatgtaagcacacctcctcagatgcatcttgtgttttatagacaggtgaatcacatgctaccaagtacagcaaattcttattctgagcagtactgcacagggctcccgccccaaatcttacagtctgacaaatattataatgctgtctgtgcccaaagcccgagtctctaggtagctgcagcatgacattttccagacacagtgctgggaatgtttaattgacctcattattctgggattcttaaaggcttccacagtgatgcccattcacaaacagtgaatgctctcttgtggtgcaaggctaaatccaattacactcttgcatagcatcaggtgacttagcaacacctacagcaacctctgtgtatcccaatgactgcatttctgattctattgtgactcagagtttctagaggcccatagggttttgggtagaagactaaactttgtttcacttatagaatacatttacttaaattttgtttttgctttttttcatgcttttggttttggttgggattttgattttggtgtgggtgactcgttttctctctctctcttaaaacaaagttctaaaagtacactaatgctataagacaaccacacacacataatatatattaaaaatccacagatgatcaaaatgaatacaaataattgattttaaggaaattaacacttcatcaattgaagtgcagaaaattcacagttgtaggctcaccttagcctcttctgaactaaaccactgaaaagaacttaagttcatgactggagtgggaaagagcagacataagaattaagtttcacagatcagtgctctaccataattctcaaacctagtggcttttaaagggcaacgatttatatcccatttttacaattcattgcctcagatcaggtcggtccctttggatcattggcatcaggcaacatcagtttaactgcatccagctggctgttgacttgagctgaagtattcaagtatgctatacttacatttatttacatgtacctcagtgtacctctctatgatcactgtattttttttttctggaacagtcaccgttctctagaagaatacatctattaaggtgaggtatatgagtatatgtgttggtgtgtatagtggcaagtccaaagtcttcatcgtgaagtggatatgacagtttaagttgcatgattatgtgcagacagaattcagtgttcctttgagacttcaggttatttttttaaataaggcctcaattatttaatgtagaacagtcatatgatggaagttagtctgttgttacttaagcctactcacgtaatcttaattctatctaaaggatatgatcactgcagcatccagatttatttgaccaaatgtgtgtatgctttgtcatacacagactgatacacataatgaactaatacatgctcacatgggttctctcatccaactgttcagtcaaagcttctgtacagggtgaccactggtttactagggagaagaaataccttgcaagcttgtgcccgaggtttcaggatgccactattgcaatatctgctggtcagaagaagtcatgcttgactgttgacagttgtagaccagaaaccatcgcactcctccctctggtcacagtgaatcatgttcctctccctagcgtgctatcaggttgtagctataaactcatgttcaacatttataaaacagtagaatttactatggcttttccaaaagtcttcgatgagatttccctcttcccacctcatcttccacacatccatctggaaaaatatgtccatgtgtgcaatagtgacatcaactttataatggcaagaaacagctttctggttggattcaagacccactccataggagataaagcatgcctagttcaggaaatctgtcttagaatctgtgagtggcgatctcagagattcctactattttttttttctaaatggacaagatatcaaatagccctctaaattcctatttctatacttatagattagtgtctctctcagatatcctcagaaatatccaaatatttctacaccttgtcaaattaccaagttttatttctttgtgctgtggatatgaattaatgaaaaacccccacaaatggtcaaagcacagcaaattaagtgtgaagtgtgcaatgtgctctgccacaaatgggcgatgtgtgtcatctctcctgagactcaattgccatagtggaaaaggaggcaaaaagcttgtaagagctggaggtgggaaagaaccagaaggaaacagtattttgtggccatgacaggactcctgcattggcacactcacagcagctgtgcttggctgcacaaaacctgcacaagaccaaacctataacattccagcatagatgagggaggggctcataggccctttttcccagctgagttactatttaatgttaatgacttctcctgggaggtaaatcagttgttttgttttgttttaaggatgtggctcatggtagatgcattgaccaagcttcaaagaatggcccaatgactatatggatagcagaaattggactcagtgggttgtaaaaaaaaagaataaaagataacacaaagttggaaagttgtaggagtgagtcttggaggatttattggggaaaagtgggggttattttaaaaaatattgtatgaatagatgaaattttcaatgaatttaaaaatatagagagttttaaagtatagacatttttctattttagtctgacagttatgatgctattgaggaacatctttaagatgtttagacactctttcttctaagttaacggagctttcaaagttttaatgaggttattccacattataccatatcttatggcttttagagtgaccgctaggtcatattttactttcgaagagtaagaatgacaagaggtagtcactatcgaggatgtcttatggcagcctttcatagagaatagtactattgttaaactagtataaatttattgccttctaccttttattagtgatattattcaaatcgcttctcggccttttggctaagatcaagtgtagtgatattattcaaaataagtggctatattttggagcttctgatttgttgctcataaaatagcaactatagcataacaatattggctatgaggtgttgaaagttgtatggatcaaatggctacgatgtattaatggtgcatatgacagactggcattttccagctagacactgaaagtatcaatgttatttcctcatgtcagggccagaccataaccagaaatttgtgtttactgaagtcaagattatttaaggtaaaatgttaaatccttaaaaaggatagaagagattaactattggccaacaaagcttttgtacttggtacaagatcatggatcacagtgatacaaagaacacacagtaatgaagaagattggaatcccagagcacctccagatactctgtggttcaaagaaacaatcaagaaacccctgaaagttgaaatcagatgcagaagcttggagagtccttcatctaaaatcatgatctgggcaagaaatccaagcaattaagatttatatcctagtaatatatttgaagaagtggctatgtggcccaaagagaaaagagaaaattgatagcttacaaagatttccaagttatcctcgaaaacccgttacaaacaagagtggaaattggtcttgatttgtgaccagactttgaggatgggttggaaagacaccttggctaaactaggagtcggtagaatgtcacatggctcttggtgtcaattatagctttgttttcataggataattatcttctcggttattttcagtctcctcttcattttgtggggtacatgttttcttggcagctaaactgtctgcagcattgttggttccttatactctttattcaggttagtcatcctcccagagcatgttcctacctagcaggtaattggaatccctgatattcctgtctgcatctcatttacacactgagaatttttctgaatctctctttaaaaaacttaccttttctcccactcattattattctactctgaaggctaacaccatgtttatttttcattgatcgcttctgaatagaataaaatagagttacttaaagccatgtttagggaaaagtataggtccctgattcaaaaagaaggcaaagaaaaaggaaaagggtcgatgcatgtatacatagatgcatacattcatgcagctcttattagggaagctagtttcttttcttgtggtagtttcattaaacattcaggtagcttctttaaaaactgcagactctatctgcatatgtatcaaaagatggcctagttggccatcactggaaagagaggcccattggacacgcaaattttatatgcctcagtacaggggaacgccagggccaaaaagtgggaatgggtgggtaggggagtggggggggggggtatgggggacttttgggatagcactggaaatgtaattgaggaaaatatgtaatagaaaatattttaaaaataaaatataaaataaaaaaattaatcttattgctaggactatgtttttaattgtatttctttaggaattttgtcttcttttatgtcttttctgaaagctctccatgttggaggtttatcagctcacagatatttcaacccttcatcaaatttctaccggttttccattggtgcaccaacgttctagtcatgacttggttagtgaacgcgagcatcgttaacttgacaatctgtagcatgtaaaatataagatgtgattttagtatcattgaagttatttcacgattacccagtttcttcttagacccaacatttgaggaagtggaagctgatggtcttttctagtattgctattagtattgtggcatgagctgaaaaccagctctctaccctctgttctaatgctattttatgtcctagcccaggagtcagaaaatgttccctgtgaagggcctgatagtacctgtccccagctttttaggccaggcatctcagtcacaaataacaaactgccatgaagtccagtaacagcaagttctgttgatataaagcttcgggtcctgagcctagactgacgatctgaacaactccatctgatccaaagtttggcttctctaagtttcaattaccagagccaactgctctgaaatattaagtacaaattacagaaataagtgtgtatacgttttaaataattttgatcactgcattttgttatattcgttctacttggttacctttgtcattgatatctatcatatccaatgaagaaattaagttttatgatagagttgttcacatagaaaaaatgtttctctataccacttgataatatctgtagtttgaggtatctaccagtagtctaatcaaaatgcatgtcctctacaccaaaagcagggctatgccactctttggttacaaaagagacaatgcctacaaaaacctttatatggtatactcagtacaaaatttagacatagacagtgagaaatgtggttgctaaaatgtttggagtctgtgttatttttttctgtgcccttccccaaagcacccgctttgtaccagggctctctgcttcctagtatcatttgtctttatatagtcttagcctaggagaggtgtcagcaaactgccaccacaggctaaaccctgcacttttgtttcttctcacgacacgcagacattctaaatgtactttctgtccccctgttggcacatgcaacagaacaaaccctctgtagggaccatacttccctcttgcactggtgctggcccattaggaattatcgtctctttttatatgtcttgacttcgcaatgaaaaattgtcacctgctttgagatgactgctgaggctaatggagccttctgtgactgcagacctgtgaagctaacaggagctggtcggatagcagagtcgcgagcttgtcctcattagctccgtgcttctgcccgtccactccaggaaaacagtgccggctggataaatttctcccgtgaaatgaagaaattcagccagcagcagctgtcccacttataatgacctctgtgtcacacagcacatacttctgcctgctgctgatgtaactgagtcactactagaaggctttcgtttgaaattattgtacatgtattaataatcagatggctcagcagcagccgtggctataaggaaggattgacaaagcatcactgcctataaaactgaataaaacaaaatccttgaggacaaaaaaaaatctcattttttttacattagttagctgtaccgtgttttagaaggcaatcaatctgtatcacaatatttaagtagactgtactatttcaggttttacaatatatgatgccaaatgagaacagtatatagatgcaaccatatggcaacatttttgtcatgtcaaatctgctttattatgcaaataaagtttcagggaaaaatatgattggggggggttgttgactccttggtagtttggtatttcccattcaaataatttattaatatttcatcataattaataaatgtctatcagctcacaacatagcaactgagtgccagtgtagtaatgaatagaatttctataactgaacacactcagaatcatgaatttaacactctacatctaacactatcccagcctgcttctgtctttgaccttaagggtaaggatctagtactctgtcaatttatccatgttttctacttaaatgattgttgtagttaaaatatacaattgctgaggcaggcacagtaggtaaaggcacttgctattcaagcctcatgacttacatttgaaccccaaaacccatgatgtaaggggagaatccactcccaactgttgccttcatgttaccatatatgtgctgcaacacctaagcacatgcatgcacatacaacataagcgacatcaaagtaggtaaggaaatctctccctgaagagcctgacataaattgaatgatatagaaagaaactttagatattattactaaaaaatgctacataggcaaaaacaaaaacaaaatgtataaatgggtgcaacatactttccaacaaaacataaatatctcaactaagggaatgaaaacatacaatatgtagatgctatgtacaagactatatgccttgccagaggactacttagctctcacagtgtgtctttgcttggtatctctcacatggaaagcattgtaacctggaaaaaaaccatatcctagtcaacaacaaaagcgactgtgctgtactggcattagtacttaattaatcagttctcaattattttatttccactgtggaaatatgttgtgggacatggtgctctcgattatgtctggctctgtggtaagcactgtatgtgtttcacttcattgagacctcatagctgcttcctgactggaaattattacctgactctcatctctgtgggaatccacgactaataactcgtctttgaagagctatgtaacagtacgttggagataagtctaagtaataccaagtttttgggaagacgaggaaggtgaattctcctgtgtcatacccttaggaaggagaacactaatcttatttccattagttctttttgaaaagctgctcctagatgtttgtctaaaagcactctattctctagacttcctttattatatttctgtggaggtcacagtgcagttggcccagaacctggaagccgatttctctgaagttttaagtctgacaatgatacacacatgaactaaagatttcgctttcatcagcttgatttataggatttaaaccaattaactgtaggaaaaagaatcaacatcttaaaatgatgtatgtatctccatcctaaacaagaaaatatgagtttattgtaaccaatcctaaggaagggctgtgttggttccgttcctgtgcaggcgctgagctgctgaagctgagtggggcttctgaccagcttgggcttgctgtctctgggttgcagaccctcttctaatataaacagtcaatgtttcccatctgtctaacttgatattagtttatagttgacattttctatgtacatacctctattattttaattataatatgtaatatattaatatatgtaattgtaatatgcaatatatgtaattatctctattatccttgacgccttctggttattctgtaatatccacttagagtcaccattttttttccatttgacctcaatatcgacatcttatgtgaacactattctagttctccactgcattactcaatatctaacacaggcatttaaaaaataattattgagtagataagtatgtcagcactttaatcttagatgcagtatttggttcatgaacacttctacttacaaataagaactgaaggaaaattgcattatgccatagtattaaataattgttaccagcctaaattagaatgaagaagcacccgagaggaaaggaaaccatagacactgcaatttaaaaattgaatttatttctttcattgggtattactttcctcttctagctttctattatttttaaatgccgacatggtacataaagcttctcatagttctattgtgtgaaatggtttcattatattatctcttctagtttcgttcattttcctagatgcatatttagaatgaatctttataaaaaaaaaaaaaaacattatgaaccttagaaaaaccgagtgaaaatcatctggatatatattggatagctaaattgaaacctggcaggttggattagctttcttctcctgaaggagcagcatatcggatttctccactgtctgtctgtgtttcagcaagagcttaataaaatgtcccatgttgaatatatagctactctgcaagtggttacaacatgcattgctcttgtaaagatcctaggttcacttcccagctttcgcatggtacctcaaagctacttagttccaggggacttaatgcttgctgtcttctggtttcagtaggctcctgcattcaggtagaactttaatcgtattcaatcacatacacatacatgtaaaataaagactctctttaaaagatgcaaagagatgggagtgtgatgaatggctgttcacgtctgttcacgggtggttagtaataatgaactaaaggttttgctctgtgctactgtgtttgtcaattattacatagaaaacattaaccacatgagaatctaattcgcagattacacaaagatgggaggaacagttgatataatgaataacaaaatgagtgtctagaaaacccttggcagcctggagggggagtgtgactataataatggaaaaaaacttaaaaagaaaaaatttcaaaatgtaaagaactcattcatgttcaaagaatagacagggaagagtaagaactatttaaacagtaatcagaggtgcgggtgtctgtaaaataaacataaaacggggatggagagatgactcagtgccaggggtcctgagcttaatttccagcaaccacatggtggctcataaccatctgtaatgggatttgatgcccacttctggcgtgtctgatgacagctacagtgtatgcatatacataaaatagataaataaacctttaaaaataaataaataaataaacataaagtaatactgtgacatcatacctcaggagcaaatatctattcatgtttgagtttcataattggaaataataataccccaagttaattacttaattgatgaatcaaaatttaaacacattataacaatattgccaaaacggtattaactgaattctaaaactgtttggttcttcacgcctagtactatgattgcaatctaagcagccaagtaacacacaaaaatacaaattattgatgtactccttggttgccacccaaagttgagggtggactcttgtttttgaagacagcacatatttaagacaaaggactcatgatctgagctggatctgacccgaagtcttctctcctacagtctagattccattgtttcagaagtactatgcaaactgttaaaggggaaaaaaaaatcaaaaagtcctacctgtctggaacacctatggaccatcacaatcacctaattaccatcacgatgagatatgcataaggtgcagaaaggggctgacggcaatcaacagccatctaattggatttaagggtcacttaacagaaaggataccatgcctggtactggaaacctagctagcttccaggaaataatatgccactgcacattgctagcccagaataatttcttacaacattctaatctcatccttatacccacagataagtgtagctatcactccttggcaaggaagcctctctttacagcaattgaagacaatcataaaaaatacaactggccataatccagagatcaatgaattatggtgacgccctctctgattgattctatagggtaacttctatatctttggctcagcaaagatcatggaagaaggggcagaaagagtgtaagagccagaataccaggaagtgagctgtgaaatggtctctggtagcaattgctgcattgctaggaattgagacagggacaatatcaatgcacatattaacatgaaatgggaggagtttcatgtgaccctaccttaaataaagaactacatatagctagtgactgatggaagaatcaaactgaaaattaaaacaaaataaaatttaaaatgttttaaagagccaaacattttttgaggtagtaaactgtatctacaaattacaattactatgaaagtctacaacctcaataaaaatcaccttttgtggtgtgctgtgggtgacccatttatagggttttcaaaatttgaattatgggcaaaagtttcaaaattggcagatgttcgttccattagagtctttcattgaacttgtagtgttgaatggaaactatctatggaggcctcatggttcagttttttgttccttttagccaactttgcatatttactccatttatcctttgagcctgccaggatttgagtactttgtacctgaatggaaaaaatatggggaagggaagtagatgaaatagctcagtagtttagcacacttcctgctcttgcagatgtcccaggttcagatcctagcatccacatctggggctcacaacttctaacttcagttctaggttatctggtgtcctcttataaactctgtcagcacatggtgctaatacatctcacccacgcatgaaacaaagcatttagacattatgtgattggcctcagaaactaaagccagatggatagaatagcacagttgcattatatattagagtaaattgttcatggtgacttgggaggtttctgtgttttgcctgtggcaagcaggagctactattgaggcaagactcgttgagtgtagtaaactgtgtttcagaagctgatggaatataaacttttgaatctgcgaccattttcttgtctgctgtacttagaccataagtcagtgcctctcgcagtatagacatccattaaatatactctgattttatggatgctgatactcaaatacagaatggatggtggtctgctccatagcgccaaagtgaaaatttattagccacttaggtagagacagatgggataaggtaaatattgaattcattgtgagttaaagtcacttccaaccctgaaaggaaatttttagcaagtgataaagaatgaaaatgtattaaatcaaattataaatagagcaagtcaagtaagtgtgtgtgtgtgtgtgtgagagagagagagagagagagagagagagagagagattaaaagctgaaaagtaaaacatatgaccacatctttgtggaatggatatggacatcaattcttagatcttaaaactgaatagccaattgctcaagctacatttttctaatgtttagttttatcttttattcatacagacttctatggttttttaacttttcagctgtattgtgccaactaaaaagtaattaatcatttctttgcaatgaaaaaatcttatcctctgctctctgcaacataacatcaaattcttgttaccttgaggtccggagtgatttgttattctatccttcaaggaaactcatggcaacaaatcaaaccatcgggaactgatttcaatttcgttgtttggggtaacaactgacatttgaaaaatcgtcttatgcaaaacatagacaatcctattcagaacccaaaatgtgacagagatatacagctaagtttttagtttttaagtgcttataaaaattgtatgtactttttaatcatggcattctaactctttgaatgttctaaaaattaggagagaaatttccttataacattgaagcaaagaaaagtcttagccttgagctagagtgccaggtatgaatgtgttcaaacacagtcctgagaagtgcattctaaccatgaaaaaaacaataacatcaatgttttgaagtcttgcaggttatttgaagcagatgtggaaattgattgagttattttttttttgctaaattttatttaaaagggataaaatgttcttgtgagtatccattttcagaaccaagaagaacagaagaatctaattgtgaacagttgtttattggcgggattagacctgtgaagtaacgttcttcatgagactatcaacagtgtagaaactcatatccagaaagggtatcatatgcgcttagaatcctatgtcatcattttgataatgtgttgactatgcatagccttcctctctgaggaatgcttagcaatttataggtttgttttaattagttttcaagactttctcataggtcaacattaataaaaccttagcccgagttttagatttactctttggtaaaacagtgttgcaaacactttcattaagtgtcttctactagttacaaatccccctcctggaatagcaccttatttctcctccttggatttaaaggcaaaaatatctatagatcttcttaggtatgaaagtgtggggagttcagtagaccctacagactcattgtctagtttcaacagcctaattctgcctccttctgtgtccctctaccccacccacgtgtccctccagtaggatttaagtaaagtcagcataatattccttcatatgaacttcagagtatgtctaaaagcagattttaattaagttattattaaaatgattataaatttatctcatttcttgatttcttaacatcaatttttctcttctttatgaaatgtttgcttttaaacaaggttaacaggttaaaccatctgccttttcattctctttgagaccattaagttcccacttatgtacaatttctggaaatgtttggttgaaaatatctgggtcatatattcttagaacttttcattaataagaccttgctgattgctacatgggcatctgcctgagttttccagtatttctcattccaatcaaagcttaataatgttttaaaaaatgagaacagctcattgtccgtttgctttattgtaataaattttaaaaatagatatgcacatacatacatatacttaagatacacctcacactgatttagtatatgtatacattatataatagttattacggtataattagacaacatttctatctccatgtgattccttttcattgtgtgtatgtatgtgcaggcatgtgtgcaggcatgcatgtacatgtgtaaactcttgtgtattggtaatgtggggacagttgacactgctctaagcaaatttcaaggaaatagtttggtacaattaactatattataagttgtccctataacttcttgatcttaaaacaaaaatttagtgctcttggatgagacttacctatctcttccttactacttgcctaaggaaccaccattatgctacttgattctatagcttgcctttccatgcataaacatgattttataacatttggccattccacttagctgagtgtccccctgggacatcaatggaaagattggtttctctttccttgctgaataaaatagcagtgtacaggcatactatgatatctctatctatttacctgaatgtgaaccttagatcatttccataccatggtcattgtgattaacactaccgtaatttcgaagtgtaagatactgcctttcttggagtttatacaagggatgaagggttttcctttttttcttttccatatcttcaatgtttattgcagctatcctaatacatatgaggcaatgtctgttaatgtgtagttatctgctgtttagagagattgactactttctcatgtatgtaattgttattggtattccttttttagagaagcatttaggctattacccatttttaaattttattttatttgtgaatatatatatatatatatatatatatatatatatatatatacactagctcaataactgggcagttcccgaacctcccatggctagcatacactcgagtaagtataatttcttttacacttaaaaataacattttccgtggtactgggaatcaaacctcagacctcatgcatattaataccgtgctctaccacctaagctatagtgtcagtctgctagacctttggaaagcaaatggaaccacataccttttctttgaaatattccaatttctctttgaatatagactacctaaaatagaaaagaaacacctaatgaatcctttattaattatagatgacgctatgtacctgacactatatccacaccttgtctgtgttatgtaatcatgacaatctggtacaggacaaatgtggttcctctttagcactgggaaatctgaggtctaagagctgaggaatatgctaagtcaaagctccattactcattttaaatgacatattgagtctacttttaagctatagaagttccttgaatgttttgatactgataatcctgtattggttaagctgtttgaaaacatttttaccatttcgtagctagaatacatttttattgcatttactgtttctttcagtgcagatgctcttagctcggtaataactccaactcacctgtgctccttcagttttattgcctggggtttcagaggtgcagctggtgaatcaccggcaagaccaagatcatggcgcttctcttcgtattttgttttctttttggagctttatgttttcacgtattgaatcgttttatgagctaatttttgtacatgatttgggataaggttcccatcccattcatcgtcttgtggaagtttcatttcactggcacaatttacggttgagactacctgtctatcaaagaacgttcttggaacatttgttaaattggttaacaaattagttgtccatttatgcatagtttgtttctgggatctcttctgtgttctgttggtctctatttctgtgtctaattcaactactatactatttttgattactgtagctttgaaatttagctgaagcaaagaggtgtgacacccatagctctgcttgacaattcagagtgttttgtggctttgtaaaacttttagacattattccatttctgtaaaaatgacactgaaatttgatgaaaattctattgaacctatagattaatctaaattctatagacattttaataatattaattgttccaatgcactattgagtgatcactttccatgtatttccttttaacttgttccatcaatgtttacagttttaagcttttagagtgctgtcacctgtctcatttccttagttacatttattcctatgtgttccaattcatcttagtgctgttatcagtggaattttaaaaaaattatttttgaaagtttttttttagttttcaaattacatgtatacattctcaatcaaatatctatgttaattttataccctgtattttactgaatttaccatataaattaataacagttatttagtggtatccttaaggtttatatgttattattaatatatgagcatgatataatgatatgtgtataagatcatgtcacctacaaacagactatgtagcttttttttttcctttttgactcagattgtttaatttattttccttatactgttgctctggctaggacactcataacagaaacacaacagaaatggtggaactgagcatcaatactttgttcaatttttttttaattccaattttaatggttgagtaatgatgttctctttaggcttgtcaaaatcaatttccattatattaaacagtatttcatctatcttaaaataatgagttttagtcataaaaggatgtataaatgtttgtagttgctgtgagttcatgaatgtgagagtcaggtcatcctaaaatcatctcacctgtccttcccgtcctccagcacttacatcctttctgcatcctttcgcactatgatccctggtcctttctgatggggaagttaatattccattcagcgctgagcacttagtctctaattctttttactttggagaattatttatttctccattgacttctgtcttccacaaagagtcacttctctgaccaaggctgagagcaattccggtctatgaatgcacacataaatattgacaaggaaatttgaaagcatgaccagaccctctagcaaaacaacaataggtgtggctacatatacaagtcccacaacaaattaagccagcaatcctggtttagatacaatagctgatttccaggccccacccttattgaaaagctattggcatgtgccagaattgttcttccttgaagaattagctattagtatgtttcccttggtttggattcagtaagtaagcccacacccatgcatgtaccagcatcattaactgaaaccagtcagctactcctgcccacccccaaaaaaggggaccattaaactgggtgaaagacatgttaaaagacaaaatagaaagattttgaaggggatgtatatgatcatattttattgcatacatgatgaaattcttaaagaaacatgtctacatttgttacatgcttttctgcatatgttgaaataatcacaaatcacataattttctttcttatcatcttactatgacatgtacaatatacctaaaaggtccatatgtttgagtgtaagctccctcaggcaggagtatccaggccctgcccccagacgactctactctacatctacatctactcttagatgcaggcagccaagctccaccctacagagaaaaccagcccaaggttcaaccataaaatctcgccaatccctgagcttgctccaagatcaggccacaaacttgcacctatcccaggccaccctggaaagttccaccttccatgaaatcctatataaaccctaccttccactaagttctttgctgtttctttcctgacaagagggagacagcctcctgtgtttcccccaataaatctcttgtgtggggtttattttgctgtgtgcctttgtggtattcctttgctcctaactgccagaatacctttcccctcacagctgtaacactagctttgagcatctcatctctaatcaatggtgctattttaagaggttgtggaacctttgggaagtggtagagatagctcactaggacagaatacataaactatatccatctctgtttcagttcatggtctagctgacatgtgaggtcctctgtcacatattcccatatacttagaatcacctcatcataattttcccttttgataaactaaaattctcctgaaaccatgagccaaaatatatcttcctctcttacatagtttctatctggtatgttgtccccaaaataagaaaacaactaaataatttctgtcattatagtgtatcacaattattcatttgcatacactgaacgtcacttaaattcccatgaatggacctttccatgtactggagtattttgctaaggattttattctatagatctggattattacaagagtccacctcagggtttctcactgactcattaccatgtttgtggatgtatatgagtctttctagtgtcttactggcccatgatgcatcagagaggatggagcatgggcagggaggtctggtaccagaccatagatgaggaaaactacaactgagtcagatcagaactcatgtctcagaccaaggcttaaaaacttactgtcacattttatttatatatattttttaattaggtattttcctcatttacatttccaatgctatcccaaaagtcccccatacactcccccccacactcccctacccacccactcccactttttggccctggcattcccctgtactggggcatataaagtttgcatgtccaatgggcctctctttccagtgatggccgtcaaggccatcttttgatacatatgcagctagagtcaagagctccagggtactagttagttcataatgttgttccacctatagggttgcagatccctttagctccttggtaatttctctagctcttccattggggtccctgtgatccatcaatagctgactgtgagcatccacttatgtgtttgctaggccccaacatagtctcacaagagacagctatatcagggtcctttcagcaaaatcttgctagtgtatgcaatggtgtcaacatttggaggctgattataggatggatccctggatatggcagtctctagatggtccatctttttgtctcagctacaaactttgactctgtaactccttccatgggtgctttgttcccaattctaagaaggggcaaagtgtccatactttggtcttcgttcttcttgagtttcatgtgtttttcaaattgtaacttatatcttgggtattctaagtttctgggctaatacccacttatcagtgagtacatatcatttgagttcttttgtaattgggttacctcactcaggataatgcctgccaggtccaaccatttgcctaggaatttcataaattcattctttttaatagctgaatagtactccattatgtaaatgtaccacatttttttatccattcctctgttgaggggcatctgggttctttccagcttcttgctattataaataaggctgctatgaacatagtggagcatgggtctttcttannnnnnnnnnnnnnnnnnnnnnnnnnnnnnnnnnnnnnnnnnnnnnnnnnnnnnnnnnnnnnnnnnnnnnnnnnnnnnnnnnnnnnnnnnnnnnnnnnnnnnnnnnnnnnnnnnnnnnnnnnnnnnnnnnnnnnnnnnnnnnnnnnnnnnnnncaagtcaaaatatcactttttgcaggatgatatgatagtatatataagtgaccctaaaaattccaccagaaggaactcctaaacctgataaacagctttggtgaagtagctgggtataaaattaactcaaacaagtcaacggcctttctctacacaaagaataaacaggctgaggaagaaattagggaaacaacacccttctcaatagtcacaaataatataaaataccttggcgtgactctaactaaggaagtgaaagatctgtatgataagaacttcaagtctctgaagaaagaaattaaagaagatctcagaagatggaaagatctcccatgctcatggactgtggcaggatcaatatagtaaaaatggctatcttgccaaaagcaatctacagattcaatgcaattcccatcaaaattccaactcaattcttcaacgaattaaaagagaaatctgccaattcatggggaataacaaaaaacctaggatagcaaaaactcttctcaaggataaaagaacctctggtggaatcaccatgcctgacctaaagctgtactacattgcaattgtgataaaaactgcatggtactggtatagagacagacaagtagaccaatggaataaaattgaagacccagaaattaacccacacacctatggtcacttgatctttgacaagggagctaaaaccatccagtggaaaaaagacagcattttcaacaaatggtgctggcacaactggtggttatcatggagaagaatgtgaactgatccattcctatctccttgtactaaggtcaaatctaagtggatcaaggagctccacataaaaccagagacactgaaacttatagaggagaaagtggggaaaagcctcgaagatatgggcacagggggaaaattcctgaatagaacagcaatggcttgtgctgtaagatcgcggattgacaaatgggacctcatgaaattgcaaagcttctgtaaggcaaaagacaccatcaataagacaaaaaggccaccaacagattggtaaaggatctttacctattctaaatcagatagtggactaatatccaatatatataaagaactcaagaaggtggactccagaaaatcaaataaccccattaaaaaatggggctcagagctaaaaacttactatcacattttaaatttggttctttgcattatggtcttaagattggttagaatctcatgaaaaaggagttgcaccattgcattttagtttataccaccttactgtgatataaaactcagtttcaaaatcaggctttcacttttacaaattgggtgactatggacagtctaacctctctatatacctcattttccagatctgaaaaacaggaaaatactggtatttcataaagtttttctggagaccaagcagctgtctggatatggcatagggtccaacaaacacaaattggctaaagaagggattgattatatcttatgttgctatttttaaagttctaatactaataaacatggctataggcttaatatatgtatccttttattcataattgatcgtggaaataatagacaatgatgtggacacttaagctaagagcaagagtattactccagctctcttagtagaggaactgaactttctctgtcgcttcttctcatttgcataccctagtttttgtccctttatcttagatttctagacctggcttattattataaatactttcttatttagttggtgatcttagctttttcttaacctcacacttataataatattttattggtcattttttaattaaaagcaagcacagtagattctttgtatttctgttaagattgtgttttgataagtcattcctcaagagatagattttcttttcccacgtagcaccatgagaataagctggctggcaattaacctaggtttctaggaagacatgacctaaggaccaaatattaataaaataaaataaaaacccaacaacaaatggtatttcctacaagagtgattctattactctacaccatcttgtagtaaataattgggagttagccatgtctttccttcaacatttttccatctacaaaataaaatcaacttcatttttcagtgtcagacagtaaagtgcagtgctatttacagaaggttaattgaattctagagttacagatagactttattattaatgagaatattattgaatgagaaatgcattttattcctttaaggaaaaatttttggaagttttggagagttacagggaatgaatttagaaaatgccagtgtttctatctctatatgtttgagtagagctccgtggatgctagagagctatctggcccccttgtattaatctgagcagttcaggctacaagtgcattttctacattggtatgcagatattcatttgaaaatgcattgtgccaactcagcacaatgtctttttcactagaaaaaggctttagattggtggttttcagccttcttaatgctatgatcctttaatacaattcctcatgttgtggtgatccccaaccataaaattattttgttgctacttcataactgtaattttgaatctctgtgtaaatacctgatatacagaatatttgatatgctaccttcaaaggggtcacaacctagaagttgaaaacctctgttttagttatttatgtctattgctttgacttgtcagttttctatggagttatttgggtaatagtagtatttaaagaaaaaccatatataatcagtaatgagaaaaagagaaaatttagcaggctgactgaattttattgatgcttctcaattattactttgatatataataaaggattttcttgagctataaaagaatggcaggtagaggcaatctaccactgttactttttacttcgattccaaacatggtcttgagttcagttaacctgacctgttaaactggatcctaatcctttaggagtttatttgagtttcaaaattgtcttatttttcccatatattgagtttaaggcaaatattactcttgcagaatttgtcatgcaagaaatgaatttgacaggaagaaaggaatgtaatgcaggaattgagtaaacggttactctcatcttaagttgtccttctgaaagctgcccattggtttaacaagccaaccttctcagagctctagcatgagtcccccaggagtgctgggggtctgaaacttttcattcttattttataattagggtggaaataatcatcactgtgtccactcacaggtgtctctcacgtacacagatgattgagcttaggaccccttgtaaatgccaaaatctgcagatgcttaaaccccattcttaaagtggcttagtagggaaccagagggtcaatggttacgagtccttagagctcttctagaagactcaagatcagttcccagtactcacctagggtggtatatagccatctgtcactactgctttggtgtaaatagagcccttttggtgaccacaagcacatataaatataaaaaaaatacactcaccacacacacatagataaaaataaaaacatatatgataaagtataagtagaaagaccacgaaaaagaccataaggtatcaaccctataggcaagtaagtaatactgaggatggcagaaataatcttccatgggaaagaacataccagttagctatccaatgctaaatggtcatctctgaagaggtggtgcatgcatgtagcattctgtagattgaacaggttatatttaagtgtatatatatatatatgcatgtaacaacaattagtgggaaaaaaagccatgaatttgaaagggagcaaaggagaccactgtatgggagcatttggagggaagaaaggggaggtaaaaatgctttgattatattataatatcaaaaataaaagaaaaatagataataattcttcagatggcatagtagatacttataagccatgcaaagtctcccatatactttggatcatatctactatgtatagcatatactgcattataaatctcatataaatacatatataatgatcagagattaatgacaagcaacatattttatatgttcaatatgggtgatttttaaatattatttcctaccatggttgaatacacagatgtgaagcagatggctaagtatatttgactcaagaatagattaaagcaatctggatagctgaaaatttcaaagaaattcttgtttatgtgcgcaagcttctcacctaacatattagtacttatgaaatatcaaatactattactcaatttcccaaaatttacagttgaaactgggatctatattctgtatatctacatgactaattcactccttcaacaaggtttagttaacatgttttcttcccagcccctggctgtgtggcagggatacagagattgtgttagcatgctcccctcccttcagatatagccatgcttccaggctatcaaagggaatacagttagtatacatttctgtccccagaactgggatggggagacagatggaccctggacaattggtgacctaagcaccaatttagtatgactcaccaacagattcatccatttataaacttacgagttgcattccaattgcatcaacaatgccaccaggtgggagccatactttcaggacatgagttggggtgtgtgtgtgtgtgtgtgtgtgtgtgtgagagagagagagagagagagagagagagagagagagagagagagagagggagagacagacagagagacagagagagagagacagagagagagatgggtgaggcattcatatgcaaatcacaatatttaaaggaagattttccatgtaaaacttaatttttatgactttataaaataaatcttcaagattattagattatcagcagctacaaaattttttattacttttataaacacacacacatatatgtgatatatgataaaggcaaatggtttgctacatacctttttttaattaggtattttcttcatttacatttccaatgctagcccaaaagtccccccataccctcccccctactacctcccccccactcccacttcttgaccctggcgttcccctgtactgaggcatataaagtttgcaagactgatgggcctctctttccaatgatggccaactaggccatcttctgatacatatgcagctagaaacatgagctctggggtgtgtgtgtgtgggggggtactggttagttcatattgttgttccacctatagggttgcagactcctttagctccttgggtactttctctagctcctcaatctgcaaaacacatgaaactcaagaagaatgaagaccaaaatgtggacactttgcccctgcttagaattgggaataaaacacccatggaaggagttacagagacaaagtttggagctgagatgaaaggatggaacatctagagactgccatacccagggatccatcctatagtcagcctccaaacgctgacaccattgcatacactagcaagattttgctgaaaggaccctgatatagctgtctcttatgagactatgccgaggcctagcaaacacagaagtggatgctcacagtcagctattggatggatcacaggtttgttacatacttttaaaggaaaaagaacaacaaacaaattgaaaatgaaagcatgcaaaactggaagtaatagtgagtaataatgcatttaatgctaacccatactaagcagcaattattacagaattgtttcaagtataacttcttgaaatgtgcttattctcacagtaaagagagttgtgttaaaattacttgtctgctaactattcaatgaatgttagttaattaccatagaaaatttattttattgtcatctaagagattcatgttaaattctctcaaatgtttcccagttttctgtcttttaattgtaaacgtcctgaagctaattctggggtatttctaagtaccattaacagtgaatgttgtctcaccaacatgactacctaaacatcaagtgagcaaagataacaataatggccacattaatgtggatagggaaagtctaggtggcttcaactctatggaaataactctaggcaacaaaggaatttgtaatatgtaattatgtgtatttatgtgtgtgtgtgtgtatatatatatatatatatgcatgtgtgtatacacacatacatatatacacacataattacatattacatatatattgtgtatcatacacatatacatatatgtgtctgtctgtgtaataacaactaataaaataaagagggaaagattcttaaagagagcaaggaatatttgtgagaagctttccagagaggaaagaaaaggaaaaaatgatgcaactatattatctcagaaataaataattttaaaaagtgaatgtttcattttattttgacttttattgtttagaagtgaaattttattatttttaaaaactaataattaagaaagataaaaaacaagagcattaccaataataactcccaaggagtttagatatacccttccagaatttactatgactatatgactgcttaatttttggatttgattattttatgaacatgaagataactctatgctctcttctcactcagcattatacaataatcctattttcataaattcttctgcagtattttaacagcccccccagtattctatcactttgcataccaacatttgttaagccagctcttcagagaagcaattataatacactcagtattcgttactatgaatgagctgtgataaatgtctttgtagctggatctgtgccaaatgatcctattagactattctaagctgttaaaacattgtttctccaatgtaagtgcacatatgagtctagattattaattacttttattcacaggctctggtcatgaagacagtgattgggcaaatgtgaaagaggtccttgatatttgcacatacactctgggattcattctcacagaagaactttggagaagtgatggcttagaaatattggaaatattatcttcccactacttacaaagtgtcgttttgggaacaataatattcatatgactctagtagttagctttccaaaataaggtaattgagcgttccaccttgcagttgataaactcttattatttttactttcaaagcataattgaaaaatattgttctgttgtgtgaaaaggcctcatgctatacagtgttttaagtaagaaataagatgttaacatcaacatcaacttctttgggtttttttttttagtataaaaataaaatctatatagatggctttaaactgacaggcattcccctacactgagcattgaggcttcacaggaccaagggcctctcctcccactgatgagtgacaggccatcctctgctacatatacggctggagcttatgtatacttccatgtatactctttagttgctggtttagtctctgggagctctggggatactggttggttcatattgtttttcttcctatggggctgcaaaccccttcagctccttgggtcctttctttagttcctccaatggggaccctgtgctcagtccaatgacaggctgagagcatataccatttgacaggcactggtagagcctctcaggagacagctatatcaggctcctgtcatcaagtacttgttggtatccaaaatggtgtctggatttggtgactgtatatgagatggatccccagatgggtcagcttctggatgccgtttccttcagtctctgagccacactttgtctctctatctcttcctatgggtattctgttcccccttatataaaggaccaaagtatccacactttggtcttccttctttgtgagtttcacgtggtttgtgaattgtatcttgggtatttcaagcttcttggctaatatccacttctcagtgagtgcatatcatgtgtgttcttatgtgattgggttacctcactcaggatgatatcctccagatccatccattgcataaaagtttcataaattcattgtttgtaatagctgagtagtactccattgtgtaaatgtatcacattttctgtatccattcctctgttgagggacatctgggttctttccagctcctggctattataaataaggctgttatgaacatagtggagcatgtgttcttatcacatgttggagtattttctgggtatgtgcccaggagtggtgttgctgggtcttcaggtagtagtactatgtctaattttctgaggaaccgccaaactgatttccagagtggttgtaccagcttgcaatcccaccagcagtggaggagtgttcctctttctccacatcctcgccagcatctgctgtcacctgagttgatcttaactattctgactggtgtgagatagaatctcagggttgttttgatttgcattcccctgatgactaaggatgctgaaaatttctttagatgtttctcagccattcggtattcctcagttgagaattctttgtttagttctgtgccccattttttaatagggttatttggttctctggagtctaacttcttgagttcttcatatatattggatattagccctctgttggatgtaggattggtaaagatcttttcccaatctgttggttgccacttatcattagtgtcttagtgggacttaaaaatttctatctcattgggnnnnnnnnnnnnnnnnnnnnattgggcagtggtggcgcatgcctttaatcccaacacttgggaggcaaaggcaggtggattcccgagtttgaggccagcctgttatacagaagtgagttccaggacagccagggctatacagagaaaccctgtctcaaaaaacccaaaaagaaaaaaaaagaatttctatctcctgatttaaccataagctgtcattaattccaatggtttatgtaggcctgttcttggcttagttcactttttaaaatgagtgtgaggtttatgaagctgtggtcactcagtgttcttttctagcagtatacaaaatatcagtaactgtgcctattaaggtagtgttgcacagtaatgttgagtctcatatttaattaaaagagctttggggttggattttgaattttagcatgatcagccattctagttttttgagaagatagtatttctctgtatatgaaatttgaaatcccatagttaaaatatccaagaaaggcaaggcagttttgactttactttgtcatagagttgtttggacaatatatgacagtgtgtatataaatatactttataaattcaagtacaaatatacactgtcatatacatatatacatatacacacatatatatgtatatgtatacactctcatatactgtgtaagcacagtaaatgtatacaaaatataatttatggatataagtataaatacacactatcatgtacatatatatatatgtatatatatatatgtatatatatatatatacacacacacttgtcatatactgtatacatatatatgtacctatgtatgtatatatgtatgtatgcatatgtgtatgtgtgtgtgtatatatatatatgtgtatatatatatatgggtatatgtgtgcatgtgtatatatctaatatttatgcataaagtgagaaaaggagtgctatctcgggatttttgtgcaaattcaaggaagcttatgtgaaatatagcaccatttgataaatactcagtaaatattagtttgacattattgttgttaacattgttttttgataatattatacacctcaaagaaaagacttttaaaatccaaagctttatatgtagggtttgtaataaatgaaccctttattttagttttggctactgtgttatttttgaattccattcaaaaatatttgaaattccaggggattttcttggcttctaatgatgatagctgtaattattttgagtgttagatgtttgtgccctacaagcttcatatctgggacaggacaagatcctgagatgtaagtactattatctcagtctcagaaggaattatctcagtttttttttttaattaaaaaatcagttaagaagccgggcgtggtggcacacgcatttattcccagcactcgggaggcagaggcaggcagatttctgagttcaaggccatcctggtctacaaagtgagttccaggacagccagggctatacagagaaaccctgtctcgaaaaacaaacaaacaagcaaaatcagttaaatgtgtttaaatatattaatatgataaagagttaaacaaaaattctaaaacttgttctagatgctctggagttgctgtggtataaatgtacaacaaaaatgctaactttctggaaagatgctagctccctaggtgagtcttcacttataatactcaaaagaaaggaaattgccatttgtgattgcttacgccatgcaggcagtcagctctgagtatccccacatgtatggtctcgtttgattcttttaggccattagaactatttggggaatcagttgcttccgtagaaaaaggttaaactactttcaaggagcacaagtgtgtgtgggaatgcaaggattccgaagctcactcctccactgaagcacaatgcagcattggactacttcatgattttgaacatataataaatgttactagagcagacttttcagctccttagaactcattacattcctcatggtatattttccctcaactacaatcaaaatattcaatttttttttattttagagtagatcttcttgcctttacatgtagatagtataggccaaatttgtaaaatctaggtgtagtttaaattcttgttaggcactcagattttcttttataacttttaaatttctcctcacaaagtcttcttttgacatgtgccaagaaacctgaaaatgtgtgttataggtggagtcctacccaggaaataaaagataagagtcatgaacttgctatggtgccacatgctattatctgtcacacagaaggtggtgagagagggcttggaaactcagtgtcagcctcctcgtttatgtagaagtagcccttctgtacacaaatcacaaaaggactgagaacaaactcggggaaacagcatctttcacatagccttaaataatataaaatatcttggggtatctctaaccaaccaaacaaaaggcttatatgattaaaaacttcttttcaataaagcaattgaagaggaaatcagaggatggaaagatctcctatgctcatggatccatatgattaatatactaaaaatggacataccaccaaaagccacctacagattcaaggcagcctccatcaaaagcgtcaatacagttcttcacagaccttgaaaggacaattctcagtctcatataaaaacaaacaaacagaaaaacagattacctaaaacaattctgaacaatatatcaatttctgacattgccaccatcctaaacctgaaactggactacagaactatagtaattaaaatagcatagttttggcacagaagcagacatcttgatcagtgggattggattgaagaaccagatatatatccacacacatatggacaactgatttttataaagaagccagaactttaccctgaaaaaagacagcagcatcttcaaaaaatggttctggtcaaattggatggttgcatgtataagagtccaagtagatctagacttatcacttgaataaaattcaaagtggattagagacctcaacataaaattggatagactgaacctgatagaaaggggaaatagtcttcaaatcattggcacaggaaaagactttctcaacaacaacaacaacaacaacaaaatagcaaagcactaagatcaataattgataaataggacccatgaaactaagaagctgctacacaacaaaggattccatcatgccgacaaggtagcagcctatagaatggaaaaaactgttaccagccatacacctgatagatagttaataaccacagtatataaagtactcaagaaactagatatcaaggaaacaaataaccaaattaaaatggggacccagatctgatcagagaattttcaggagaggaaactcaaatggctgagagacactcaaaatgttcaatatctttagtcatcaggggaatgcaaatcaaaacagagacacttgcttattgagcacattcactgcttctctactcataatatggagacactggaaaaaacttagctgtccctcaacctcaacagatgaataaagaaaggtagtcaattttcattgatagaatattgctcaactgataaaaatgacatcatggaatttgcaagtaaatgaatggaacatgaggtgggggggcatcatgaaggaagtaacccagatctagaaagacaaatatggaaatgtggtatgtgttgcttatatgtggatattagctggtaaagttgtaatccatagaaccaaagagacaaacatttttggtcccttttttgtttgtttgtttttaacgaattattttatttatttgcatcccaaacgttgcccctcctccctgcacccctctcagagttcttcatcttattccccactccccttcgcctctgagagggtgttcccttttaccccaaggcatcccccttccctggtacatcaagtctctacaggattagcagcatcctctcccactgaggtcagacaaggcagtcttgtgctacgcatgtgccaggggctgcaaaccagctcatgtatgctcattacatgagtggtgacttagtctctgggagctcccaggggtccaggttagttgacactgttggtcttcctatggggttgttattcacttcagcaccttcagttcttcccctaactcttccataggatccctgccctcagtctagtggctggctctaagtatctgcatctgtctcagctgctggtcctcttggaggacagccatgctaggctcctgtctgcaagcgcaggagcatcagtaattgtgttcggatttggtgcctgcacatagaatggatcccaagttgtgcctgtcagtggtctgccatttattcagtctctcctccatttttgtccctgcatttcttttagacaggaacactctttttttaaaaaatcactcttttgagtttatttctggaatttcttccaccttgatgtctttaggatctgttccctaaagacaaccttggcatagttttgtctgtttggtgtttcattattttcatatttattgtgtttttgcattgagatttgcatgccagttgtgatggacagcccttacaatttgattcaataaccttcaaaataagcggccttcttgtgaggtattgtgcggtgttgatttattttaagctggccacagtactatacttttcctgtagcttctttggttgctaatcataagtttgggtaaaaacaaacagacaaacaaacaaaagcatactatatttgatagagaagctcattgggtttaggctttaccacctctgactttacctgtgttgttggacattagttggcagctaagaacttatgtctcctggtacgcctgtgttatggctaaatctgggctcagttccttccattcgggctagtaacatagctgagacacaaagcacaaagatcttgggcttgatacatgcaccctcgtgcatgcaagcacatatatgactgatgatatagctcggtgggtggaatccttacctagcatgtataaagattccatcccagtagtcaagactccaccaaaattttagaactggaaaagtaaaggcaggcaggtcagaagctcagtcctcctcatgtaattagcaagtttgaggtcaacatagactatatgaaaccccgtctcaaacaaaagcatgtgtgtggggggagggtttccgcagatatggtggcacatgtctggaatctcagttactccaaggactctgacagaagggacatgaagtacgattgaatatgtggatatcctaagtcagacagagcctatctcaaaattgaaagcaaaacaaaacaaaacaaaacaccagaacattaaaggttatagatgtagttcactggcaaagcatttgccaagcacatgggaggtcctgggtttgatcccagcactgggagaacgagtagaaacaaggcaataaataaacaaacaaataaacaaaacaaacatgatttgaaattattcaaaaagaaagtaaagataaaatttaaataatttaaagatagaagtcagaaaaagagaaagatattttaatcgtttaagaacagaaaagtctgtccctcctccccccaagggacatatgtcactatataatggcacatactaggactcctattaattctgtggactttgtttaactttgccttaggcctctgaggaaacactgcactcctgtaatgaagaagaggacccttttcgtggaatggagccctatctcgtacggcgactttcttcccgcagcattcagcttccacctctggccttcagacagttggaacaagcagacttgcgaagcgaatcagagaacatccctcggccaactagcctccccttgaaaatcctgcctctgatcgccgtcacatctgcagactcaagtgggtgagtgcctttggtgacgcttccacagtgcacattgttgatggcgattgttatgtgggatgctttagggtttgcttggggcagacattgtttgatttgagaaggacaatgagtttttgaatcaaaaaaagaagaagaatgaaagggtttcttctggtaacatctgtctctgtgtgggatgagacagtttagttgaaccattttccaagagagtgttgaaaagtactgggtgactgcttagacgattccaggaaaaggaaattgtaccagaagaacgttgactggccgtaagtggtttttacagttcttagcaagtgataactaatggattaattatcacgtaggcagacacaggcagaaactgtaggtaataattcattgagacaaaatgaatctggaattaagactatactatgctgtaattagaataaatgaagatatgcgattatattcatgagcctagtaatttggcctctgacactctaagctattacctgaatgctattttagcacttatcagtattgatattaataaatcaatttcatttagcctcagtagttagaatagagtcagcaaaagtctgtctggcgccgtgtaccttcctactttggtagagtgagtacttcttatggtttttttttttaatctgtttggcaatggataatttactctttaatggtaatattggcccatgaaacagtgaaatgaggctagtggacatatctactgtcttctcgcctggttagctgcatcttaaagaagtttggatggaaaagaaagtggaaactagaagctcatatgtacacagactcccaagtatttcctacgagatgccagaaaaatcactcgtgctacataaaggtctcttgttcatcctctgcagggtgaaagacatttctagggaaggtactttccagatttacaaaagaaaaaaggcatgtgctcaaaagaaatttgtctagtaattcaactctgaaagtattgaatttagcttcttaaactgttacttaccagtccacaaaccctgtgatgtttaaaaaagaaagtaaaatcaattgctgctaaataagaagatcataaattctcactttgttagagtggaaaagggaaatatgcattattatattcttcttgatcaattatacataaggaaactgtgtaaataaatattgagtagtttcatagtgttacaggcaggaatggagtatggctgcctaatatgaggattctttgtaaaaggactgtagctttgaacttgatttgaatcagcttctctggtgtccactgatatagagaagggggattcagacactaggccgtcagacagtcccaagatcaattctagttgattgtcttggagatcacccagaacacattagttattcttttttaacattagttattcttatgattatggtttatttcaatgatcaattttaaagaaaattcagccaagagaaggtcacatggacacctggtcagatgtaaccatccaaaagtcccctcccgaagtagaattgggactgctccatccacgagttataatggatcactagtgaggttttccccaggaatgccctcaccaggaatcctgcatagaactcagtatccagattttccactatgagtagtcaccctctcttcttcctaggagcctaggaggtaccagtgcagacttccaggagaaaagtgggtgggacacagaaaccacagtgtctgtacgaatggtttgggcataaagatccatacctgccatataaggagtggggagaaattaaacctacagaagggagtccctaaaagacagttcaggatccctctttcaaactgaccttttaaaattcaacagtcatagccctaattaactcttttctgtatacaaggtgcatcttagaataattgccttgcttcctccacacttgaagaggaaggcttcctaattaagtttcactagactaatttaagttcctgatatactaaattaatgttggtatctgagaagtttggtggataacttgatttctcatttcaatgtcatgtacttttaaaacaaaatgctgaagtgtacttaatatcatctctgtgtagtttgataatgtgtataattaaaaaccttaggtaagagctaaacatatttaattaaatttgaatgtgttgttcaaaacaaacagagtccccaagtggcaaggagcttaaggatttaagatgccagcgtcctagaactttggttgtttcaaaatttgtttttctctcaatgaagaaccagagacttaagtttcagtgcaatatgataaagaaataaatgcgtattttacaaagagacaaagatgacttttgttccaaaaggcagccgagagaagccatgaagaatagccagtgaacagaaaaacagagacaagagagttattgaagggactgctatgacctaaggaaacaaaaataagttttgaattaaataccaggtgtcaggaaattaaggaatataaattccagaagttagaaattagaaatgtttctttgctgcccttagaacaatggattccttccaaatcatggaatcatgatatcgtggtatcaaagaatggatgggggagattcatgttactctcaataagttgatcagaacccaattagcctttagtaagggctagtgtatgggtgcatgtgtgtatgtgtgtgtgtgtgtgtgtgtgtgcctgtgtgtatgtgtgagtgtgtatgggtgttttgttgtgagcacaaaataggattgttaagactggatacaccaagaagcttgaacccacccatctgctagtgttccatgtagggtagaattttccaagtactctggacattgattgaccttttattaacagcttgaaatcatataaagttaaagattaagtagcctggactgctgtggttttatgtacatcttcactgattgataggcattggagttactactagcttggtgatgtcgtgactacagctctgatgaaacattttgaagcaaatctattatagatatatggctaattcctttctgttctggaatggaggctcactggatattcataaccacttggaccagagaaggctctgaatttcttgcccctgtcagcagtacacatttacccaggacttcatctgttccaacaatttcaaccaatgtacaaaaattctctattctagccactgtttatgctgatgaacaggtatcttttggttttaaagatttcttttgtttttgtttttaaaatttttattcacactgtagcttaagaagacattgcacttcataatggttgtgagccagcatgtggtttgcttgatattgaactcagaatctctggaaaagcagtcagtactcttaacccctgagctatctctccagccttgtgaacaggtatcttaatgtagtttagtttaggttttcattatgaatagtgatattgtttacattttgatacattgttgaacatttttgatatctcctttgtggtatatgcacttgaataattttctagtttttttttttcttttacttgttaaatttaaaggatcctttaggtagtctagacataagaattgtattagataaatgtgctatggcatgaatattttctcatagagatcagtctgaatttttatctcctgtttgttttttcaacatggtgggccctcaaaagtgtgagcatttgcacttgacaaaacaaaaaacaaaccaccccccccccagaatatcagaatatcataaagaaatgaaagagacctggtacagtaatgacagaagataggaggaaagagaaaggaggaagatcagaaagcaggagaaatggcacaaaagagaatattatgtataggttctgcagacaggcagtagaccctgcttaataaggaaatagcagctggcacacacaccactaactcccagggtaaattcccctggggagaatggttgctggctcctgggatggtggctagtgacacctgggatacacaggcagtggagatgcagacagaaaaatgctgaggatgaaattacaccatgctttgggggattgcattgtgattggacaagggctggggttctgttctgggtgggttggctgtgagctctgccttctccttcaccagcattgcatcttgggaaaggacttcaagtgtctatctctataagggtacaataggaaaatgggttcttcccattgtaggttagtctcaaaggcaaaatggttacaattgttttgttttgtcttttgacattttatatgtgcttgatagcaacaagagcttccactcctatactctttggggaaagtattggaaaaaataatatttgttgtatgtattatgatctcactttcagaagctggctttgaagagcctctactaataactttggggtagagatagatgttctagtagatgttggagggaggctgacttctgtttctgattcagagagtcaccattactgtgggacttatatatgtgtgtgtgtgtgtgtgtgtgtgtgtgtgtgtgtgtgtgtgaataaggcttcatcttgttttagagtcattggcaggtgacagtcctgatttaagtgctatttagttgtgtttgcaatgacagtagaggttgtccttccagtaaaattctataagtaaaagctgatttctccatgtttcacactgttcaaaaccccctgaaaggaatcatgagtcccaactggcccccagaaactgacttatgtttcctgagtggctcatgtaccccaggtactacgctaagaggagtttagcttgacacatacaaggcacaggaaggtagaggaaggagagggaggaggtgctaaatctttctagtcatcattcactgcagcattggccataataaagaagagccaaggaacaagttgttcccttgtgatgggatgacacagctctggatggaggcataatatccaggcctatatgtgggaggagaatattacaagcatttcttcatcactggcatcctattacctgtctggaagagtacattgggtacattaatatcactttgtcctatttttaaaaaatgaatagaatttaaaggaagaaatgatcccccctgaggattaaatagtgcatggaagaattatctagtcacataaagttcactttatgaggttcttagagacttatttccatgagtggtgtgtcattcgcatagggggtggtcccagatgccagttagatgatgaagtctttgatcgagtgctcaatgcctagtcctcttgagtacaaagcatacaccacagcgaacacacgcaaaaataaaaataataaaacttttagcatttagtgactcaactgaaatccgaataaaaggtgaaaacaaggaaaacaaaaatctgcttagagcagacgcctctgtctttcctcatctgtacccttctaatgtgaaaagatattagcagtaggcattttgtctttgaggtattttagttgtaaagtttgatgaagctaaagggttgtatgccacagcctccttgttgagcctacaccttcatattgattgtgcactcatgtactgggagattcatttcctagggtcttattgaacattatatagaacatctataatctactgggcacagctgctgtgagagattcaggagcagtgtatcattcttgagctgtatgtggttttaaaaatgaataactggaaaaagataagaagcgatatacctaacagagttgaagtcacaagcaacatagaaaaagcataattcttttgcctctgatttatttaatttcaatttatttacataatgttctatgctaaaagttttaagattaatcaccaaacatcatagcctttctattcaattaagtctagtctactttggctttataacttgtgatgtttcaagactaaaattagtttcagtataatggagtactttcttcctactatgtttattgacgacattttattttgataatcagtagcaatttgtgtttttaatctaaaataaacaaaaaaaaattctgactccttttcttcacacatcatagactctctgaagagttcacatatctgccatgttcacagtttacaaaatagtatgataattatccaactgcagtgtcctttcttcacagtgtgattcaattttttttatttttattattgcagaacttctggtatctgcatttaggattccctgtctgtgtaatataccatgacattttactcttagatgtataatgtattggcttatagcaggaagtacttttatttataaatcaagatgttgtagttcatggtctccaaaacactaaagagggaagaggatgtgaattcattacactctagcatctggtaggaatggctaattatttcttgtgccagcttgacttgtttaaatcatataggttgttttggagtcagatactttccagcagtgagcccaccgaaacacttacttcattgcaaaacataggagaaacataaatcactctgtataatgccagacactcaggaggtcaaggggttaaaaacataggcagaggtaaaagggaatcaacagcccagacatgagtggaactagcatagatgtcaaaagaaaggttttatcaagagagaggagacatgatcgtcagtatatacacatgaataaacagaagtatgcccacagaagctcgggtaggagaaaatacaacagccttccctcagtgtgtcacaaggaagtgactcctcagaatacacctggttgggaagaagttaggatgtgagctcaccctccagtaaagaggctggaaaggaaggggcgtttattcatcctggagagaagaaacttctgcagagcttcactgaacaggagaacaatgagagtgggatttaaacaagagagaaatgacagagcaaggtcaggtcgagacactgaaagacacacacagagggaagaacctgtctcagatggttcttctgtaggagacatggagagctcacttcccaagcgtttgtatgaatcttctagctgtcccctaacagagagatgctcactcagtggagcagttggatcgtgacttggaaacctcactgcaactatggtactctggagttcttgagactttttttcagcatctattacaaacagcagcatcttctagttttgaagatgttggcactttctaaactattcagctgtttgttagaattactataatagaatatagaaagtgaggggtgtttttaaagatgggtattcttttttatgttcagttaggctataatgtatttaataaactcctttatacctatctctaatgatcttaccagttaatgtattacttaagtgttctgaggtagcatccaggttttcatttgcaaattttctttcttagaaatgatggcaacttaaaacactgtagcctcctcttctattcgcaaacactgtctctgaaatgtgagcagtattctagttaatcatgtcagttcagtcagtaaaatttgtatgtggttaattctatgtacagaatgcattctttaataaattgggccgctatagtggccttgataaaacaatgcatgtattccatgaatttggaagcaatatattattttcataatttaatataaagtaacctgaagcctattatttttttgtagaagagttcattttggcctatggttgtagagagataaaagccggttaataccatagcagtgaagaatggcagtaggcaggaggcagctgagttcacatcttcataatgcacacagtagacagagagagcagactagaatggcttgagcttttaaactctcaaagtttacctctcccaacaaggccatgtgtcttaatgctcaactgaactaagtattcaaatgccttggacaacgagaggcctttcttaatcaaaccactataagagatcaggaggctctactgtctccatgtacttttctaacaagtatttgttttaatttttgagattataatcacactatctccccttccctctctctcctccaaaccctcccacatacctactagttgcttctttccttcctttgggagtttgtgtggcccctatggtaccatgaaagatgaagcttactgcttttgtttaatactttatcggaaagaattgcatgcttgagacctaacattagcacagtttttcatggtatcttttgttaccttggcctggcaattcttttaatttgaattcaaatgccctaatatagtgtttgtgactctaatttagcaactttgcagtgtgctgtgtttacaaattgacaatgtgcaccataaagacctaagcagcgagtgctgcaacttgtcttgagaaggaaagggaaggttcgtcaacctctagaaggttgctgcaacaaaccaagaccagaacctacattttttggcctataggctctaataagttcagcccaagaaactgagataagggctgataactttaattgttcctgtaaaacttcccatgtgtcaaagataccctttgctattggcaagaagtaaatggatggtagtgaaaattcacatgcatggaccattatgtagttgttaagatgattgtggtgataactatggatgtctttagaacccatttgggaaaaaagaaacatacaagtatgtccatattaaagttacaatactgcaccacacctgcacctatctaagaaatggaaagcaatgtgaaaagcataattctctgatataatttattccatcaacaagattgtaataaaattaaatacaagctttgtgagcgcccgactcgccagcaagaaagatgccacaacaggatccttctgcacacgtttattgggagagcttgattgcagaggcgaaaagaccctgagccccagaactggcgatgcttatataggcctaggaggggcgtgtccacacccgattggttatgctttcagtacctcatttacatgccttgggccaggctataggcgcctcatttgcatgcctccagccaggcagtgactctgcaaaaaaactctactgcacatttgcacattggttgtttacccaaacttatgggtggtggccagcagtagctggcaccatcctgcaatggtgtatgtggcttcccacaaagctttattagccatttttcgagtctaagtatctactaatccctgatttctaatacacactgagtatggtacctggaataaagtgtaatcaggtgagtctgatatgtgtgcctgcacataatcaaataggaaattaggcaactatgggggaaggttcatggaccttcaacctccctccagattactttatttaatcatttctttgtcaacaattttctagagaacaccatcaggaaaaaaaaaaaaaggaattgatcaaagaaaactgagcaatagctccctgcaatgaaggagatgccaacactaaattgtaggttttcagaaaggcagaggaacgatatttataaggctcgagagcagtgattctcagcctgtagattgcaacccctttgaggtcaaatgactgtttcacagaggttggaagatcacaagaagacacagatatttacattgtaatttgtagcagtagtaaaattacaactaagaagtggcaacaaaaatagttgggggtcaccacaatatgaggtactgtattaaagggttacagcattaggaaagttgagaacttctgctctagatccaaatctttctaggtaaaaataaatggaatttggcagaatacagaccccattttgtccagattgggtaggagatggagttctgccttccactaacaaagctgtgtggcaggtcgttactggttgccctctggcccttcgagcagggccctgtacctctgtgcggtcaggttgacccacaaaaatatatgcaactctgttgactgggaaaagatcgtggcattgtactgtggctcttggtgatgtagccagagccagtataaactgtgctgttgaccgacaggattctgaggatactgtacaccattaaattaagctcctgactacttgttaggtttgcgtcatcctgctcaaactggctctccaaactccctgtccattctgaatactgttctgtattcatttgtaagttcctattgtttatggctaggtggtgatttctattgcttgtggctctgaaccatgacaaggacacagacactgaatttattataaaatgtatcaagtttagaaatcaagatgcaggaagtactctgagtcgtctagaacttaattgtcctatcagtggtgaatttagttggaggaagcaaggagaaaagtgagttccattccagtgctttttatatatataaaggagtgacaaagtaagggcggcagagggaagagcctctggagatgcccctggctaactttgcaaagctctcaatatggagataaagacagggcctccatgtaattattcccctttgactgctcaagctggtaggcttaaaatggactcctaatgagagtggtttgcattgcaattaattaagagcatgaaattaaaaactgaatgccttttctctctctagaggatattctttataagtattgttttaacttctctgtctcactgtgaactccctccctttctctctctccttcttttcttctccctctgtgttctttcttcctctactgagggagaattaactccaatcttcaacagtctacaggcaggggcatttttcttaacactggagcaaacctttatctaactgttttttgtgtctcacgtttatcagttgtttctgatataaatgttttgaaggcaatcgcaaggaaaaaataaaaatgttcagtaagcctttggcacagatgttcttgtcctctaaaagtcatttctctttattttaatgtaagagaatgacagacagtcaaacagacagacagacaggcagacggagactataagaatatgaacacatgcatgaagttattatgaagaattatttcagaggcaaatcatctctggaagttgagaaaacatagatttctccaaacaacaatcttgagaagtctggtggtcataccttgccccccaacccttccttccacctgaacataatccatctctagtctacccttagccttcaaacttctgttataataccatgcttcagaattcgctttattttgatatcttctatgtgaataaactatctgttccttgtggggtgttttctagtgaaataggatggagctaggaggttcgtacattgtggggtgtttagtgacctgaccaaggatcagtgttaatgtgatgaaaagaaactgatacaagcatagacttaaaaattgctcacaatgttagctgcatgtggaatattatttcctaaaactccaacagatctgatgactggccaaagaaaagtgtgaaataagaacagtcacgaaggagatttggagccaatatgaaagttgagaagactacatattacaacacagtgcctttatgtgtgtatgtaaaatgtgcatgtatatatgtatttgtgtgtatacattccctgaaccacaaaaacaggtaatagtcctcattgtcctcattgtctttcatctccatatcttgaaaagttgacaagtgaagaagactgtattagcatgaaccctgtgctaagcagtgggcagcctcgtatatgcaccactatcttcttttcccaggtaggagaactgcaatgtggaaggggtcaataatgtcctcagagtcaacgagaaataacatataacccaaatctgaaagtctccagttttaatctatgtatatcagaatctccagttccactttaatatagcttttgtgtcctacagagctgctaatgatatgggacaacccacctgtggttataatcttccctgtggaatatgtggagattttcagaaatttgccttaatatacccattctatccaaggaagttcctaccaaaccccacagtttcttttttttttttttttttttttttttcacagtttcttaaatagtggtatgaactgggcattatttggccagcatagttctcagctgctaagaaacagtgtggcaaagactgggttcctgggacattggagatcataaaaaaaaaaaaaaaagttctctaggttcagatgggaggggaggtgggaaggaactggaaggaactcagaaggaagggagcagaaatgaggatctattatatgagaaaagaatctatttttaataaagggaacagggttctcaattctcctaaacccagagtctggcctaataattagaaagttatattgcatggactgcaagtctttaacttactgctttgaaagagttaacaccaccagagttttatagaactatattagacgccataaaaagaaaagtcctccttcacctccggttggatttcactgttgttaatttacactattaattaaaatgttttaatcagaacaccatgtcatgacacaacaccaagctctatagttatgcagccactgattattgtttaagcaatgtcaaaattagctttagaaaaataaccatgtagccccactttaggctctgtgtactgatgagggaagcaaagtcagagaaggttttcagaacaaaattggcaccagttgaaaaacctaagccaagtctcacaattttgttttcctctgtttgttgttttgtttttgcatatatatattgaaaaatgaccaagtaatctaatattacagcaacaaaataattttggatggctcctaatttacatttaaatcattctcatggaggcattattgtaagcataaacaaagagattactttgagcaacaaaggcctttacacctgagaaatacattaactataacatttcaaattatgggttttagtaaacatatctaaaaaggcattatatggattggaatagctttgcttctggaatttatttttctaatagtctgtctgaaaaggaacagtgctagccttctttctctgggtgagttgtggaataggatacttagtgggagccagttagagctgagaacaatggaatttccaagtcaagagccatgtgattgttttattgtaatttttattaaagctattctgtgacagttccatatgtgtgtgtgatgcactctggttgctttcactccttctcctcccttatttctctccactccatcaggtctcctcccatactccctctctcatatttgcgtacttttgttttgtaaccactgtatataaataactaggagcagcgtcctgcgtgaccatgggtttagaagtgtccctttgagcgtggcaagctctctagtgggtgctcaattaaggccagtgcctgcaccttccacagagtagatgtaaccaatgagttagcagagagggaagggccctgtgcattcctccccagccccaattgactaatggcagactcaaccctgcatgcataagagataggactaagatcctggcttaagacattgaatgatgaaggcaatcacaggtgataaaaggagtcaaatttcacaactatctgggagcaaacaagagccttgtagtatgggaagggacatgctccgttacagtactctagttgtgaatacatgctaggtacttggaatttatactgaaatgcttattggattgactaatttactttaaacctacaggtttcaaggtgttttgttttcataacagaataaaccaagatcaaaatctcaagaaaagattggattataacttatatattcattgttaattgaaatggtaccaatggacgcttccaagtgccctatcctgaggttatcacaacaaaatctagaagcttctttcatattgattacatattttatttgactcatctcaatgagtggagaacatagatttttaaaatatattctctatatattttattagtatagggaccccaaaatatgtttttcttgttcatattgcttagtatctctgctgagaatgtatagccttatggactctgtcaaaatcgagttaagaaatcattacggtgggactagagggatggttcactggttaggaggacttcttccctttgcagaggacccaggttgcaaaggacattggtagctcacaaccatctgtgactccacttccagaggacatggcaccttctactgacctctacaggagccaggcttacacacgatccacaggcattcatgcagacaacactcatgatataaaattcattttttaaagaaacggttgtggaaatagaagattgagatttgattcccagagttcagtcctgttaatcagtagaggaagctggccatcttagaggtgttgacaagattaaaaacaaacaaaagcaatgcagagtgcatcacctcattgtgaatagagctgtgtttcttacctgaacaatagaatggcacattttagcagaaagcataattaaagtaggggaactctccgtgtagcatggagtataacttagtgatgaaaatccaaaccagagaacattaagtgtggttattcacaatctcatttgttgtgctggggaacagatttgtcttctcaactctggggttaaattaggatagagaatgtgtgtgttggaaggcagcctgtttctccgttctgctgtcttatggcttttggtatggctcaatgccattgtgttctagtaaaaattaccatttgatggactgctgggagagcaggcagggagtgggggtgtgagaagcgtgggcgagtccctacaaatgtgaaaagaatggttccttagtcgtgtttgggagcgttgctcaaaattcttcacgttcacggagtggagcattaaggaattagaatatttcttttttaaaaacagggaactagaactaatgtctgttcctctgaggcaggcttttgtccatgtatgaaagcattatcttaagaactcctttggcgtattggaaggtctctgatgcattacataaaggagaagtaggagtggaccttgcttcccaaagccttgccctctacttaagcactgtgacccccgatggaggagagtgatgacttgcgtctctttctacagcatctgaatagctagatctaccagggcagattgtacacataatcttctccactctctctctttctttctttcttttttcttctgcagaaagtgttcagctctgtaaagtagacagtggctgaaatttggagctgagatcagcttagctgcattgtccccctgaagtgcaaaatttaaaaagtgttcatagcaagttagtatttgtagtgagaaagaaaccactacagattttaaatagaatgtggcttatattataaatatcatgaatcattttaaaaactgtgttttgttagctgtaacacagttctataacttttactctagacttcaactacatgctctttgatggattcttcaagtgaaacttaatgtaccctgtataaacacattaaaaagaaaaagtcaagcctttctcaagtatggcttattttttaattattattagttaaaaaatggtaactttgtataaattatgaaagcaggtgtcaagttttaagaaatttttaccatgtattgtatgaatgaactaagtgatttcagagcatttgcagggtgtgtttgtggggatagtgattagtgcgatgtatcttctcattcggtgaatgctttgtcatccaggtcttggctatgtgtcataacataaatccaggtcttcttcattaatgtcagtatgccatgtcaaattagaaaaaataaataaacttttctcaatatgttaatttgattcaccctctcatgattaattaaattgtcaagcttttcctggtagtcatttttcttaaaaacctctctctctcactctctctctctctctcccctctcttctctctctctctctctctctctctctctctctctctctctgtgtgtgtgtgtgtgtgtgtgtgcgtgcgtgtgagtgtacatatgcatgtatgtgtgtgtttctgatcaccccctttgaaattatctgggaaaatggttacagttttcttcctggtatatttcttgatttcatcagtcagctttattacacttttcatatttcaataacaagattcaaaatttcatctcaatgatttgttttttacatttctttaataaatgaacttaaagataaaagaggtactattcagacacatctgtattgagttcaataattccccaccagtattattgagagattccaaacatttctccaactccactgtatgcttgctattgggaggccatttgttttagtatttctgcagcatatgattgaatgagcacatggaccagatgcattctcagaggtactgatgatgcttatgagggaagaatccccaacttaaaccaaagtgtcctctgctcctcctgcttttctgaaactcccaagaacacacacacgcacacacacacacacacacacacacacacacacacgcacgcgcgcacacacacacacatgcacacacacacacacatgcacacacacacatgcacacacacacacacgcacatacacacacgcacacacacacacacacacgcacacgcacacgcacacacgcacacacacgcacacgcacacacaggcacgcgcacacacacacacatgcacacacacacacacatgcacacacacacatgcacacacacacatgcacacacacacacacgcacatacacacacgcacacacacacacacgcacacgcgcacacgcacacgcacacacacgcacacgcacacgcacacacacacacacacacacacacacacacaccacttgcctttctcgtatgcctcgttcatgctgcttttgtttttagtgcctacatccccctctaaaatattgtttcttttgctcctacctttttctccgttagtatctatgctccacagagataggcctgggtcagactttctgggtcagacacaaatgactgcaaatcgatggcttaaaacagcaaaaatgtattccttctgaatttgggaggccagaacttcaaaatcaaatgtcagtccacctaattctttcaagaggctctgagggataattggctacaaacctctctcagagcttctggaggcttctgacaactcctggcatccctgggtgtgaagctgcataacttcagcctctgagtttgtcctcacacggccttcttctgtctgtgcctctgcatcttttactattctattcttcaaaaggcatccttaaagaaccttagctcattagacttgagcgcagcctagcccaagatgacctcatttggggatccttaccctaatcacatttacgaagactcttggaacaaatagagctccattctcattccatgtggcctccagttcaacacactgcagaaggcagaacttcctgttttactcactgctgtatagttggcacctagaacagagcctggaaggaagttagggctcaataaacatttgctgaataaatacactgagggtctccaacacgccagatagggaatatgtggatggctgcaacttaactcaccctcaagatagttcactttcttttctccatttgcataaaagttctaaggaataaaaatgttatctctgatagtgtttgtggatcatggattctgtaaaatcatgctagtgtgattagtgatgtgcaaatagtagacatgtaagtgggcagcagaccctttcagaaccactcgtcattggttggtcttcaatgcaagcatccttgtccgccttccctgatgggtgaggtatctatttagaagacatggacttgacaaggagtgactgtcttgttttcaaaattccttctctttgcctaagagtatacacaggtatgaaaggcatatgtaagtttaaaaattctacttaaaaaatgccaatatcaagctttagtaatgaaatttgttgtaaacataattataatgtacttttacaagtttgcttgttatagcttgaacttaaaatattacagatgagcaaaataaaaatcagggaaaaaaaaagaagaggccagaaactatcaccaatagtttatattttcctataaaaatatttgctagaaatgtcagtggctctaatatcctcttgtaaactcatgctttataaaaagcattacctaaattacccatttcctatattatctctgtaaaacagaaaacactctccaggctcttcattgtgaagaacggatgttattgatgagacagcatcatttgttcgctatgctgtactcattcgccatttagcctcttaattagacaataaacttgagcttgcaagccttcttaaggcaatggtttactcatatattcagaaccaaatggagcctcataatagttgaaaaaaatttcactcagcaagaagtagaatatgctttgtattgtaaacaaaaattgcaataaatatctattattaacacagaaaatatatgtaaaagacagtggtatttctattctgtgagttaatggcagctagtccatctcatagacttgtactcccaggaaagatgctcgctgaaaggaccatagactatttcaggtaaaaaaaattctggaaagctgacacttttcctagcatgcatgcacacattcatactgtcagactaggttgccgatttcacaacaggataaactacatacatggacatatattctacaagggagaaagtgcctctcctaccaatgcattagaaaagagctgggcgtggtggtgcacacctttcatcctagcacttgggaggcagaggcaggcgaatttctgagttcaaggccagcctgatctacagagtgagttccagaacagccagggttacacagagaaaccctgcctggaaaaaccaaaaaaaaaaaaaaaaaaaaaaaaagaaagaaagaaaggaaggaaggaaggaaggaaggaaggaaggaaggaaggaaggaaggaaagaaaagaacattacaactagtaaagttagttcccaaatgcttttgaggaaaaaaaaagaaaagaaaagaaaaactccaagagtattatatgggctgattgactgatcagctattgtaaccatagccttattttatctatgcttatggcttttttctgggggtgggggggtttaaaggcattattgtttttacacagagaaatatcagatatttttagttcctgaatatcagaagatatgaaagcattatcttgtttgcatgataaaaacttagaaaagtaaaattaacttttagaacacattcttttagcccccttttcctgttctctcaagacctagaagatatcttagtctgggtgatcaaactagagcagttgaattaatttgttctgatcctcttgttcttgtcttagatcctaagggtgaaaaccaagctacaaggtcctgatgaaattttgttttgttctgtttctttgtttttcgagatagggtttctctgtgtagccctggctgtcctggaactcactttgtagaccaggctggctttgaactcagaaatccacctgcctctacctctgcctcccaagtgctgggattaaaggcatgcaccaccactaacccggcctgatgaaatatttttaatgtatgtttaagggatagaaggttgcttagtggctattaatatttgttgtctttcagacgaccaaggtttggtttctagaacccatataatggctcgcaaatattgggaactacagttccaggggatctactgctcttctgatttctttgggctccaagcgtgcgtgtgtgcacgtgcgcgcgcacacacatacacaaacacatacacacatacacacgaggagtacatatatatgtacattcaagcaaaacactcatacacaaaaaataaaacaaatatctaaagagagacatacttaaataatcatccagtatcgttagtgtctacctttattctgaaagcatggacccttgtcgttgaaaaccacaaaaacacatcaaactctggcaaatctcagcttgacaagcaacacttggttgcatccaattcataagtacaaaaggacctccctggctttgtttctctgtaaaacctgtattgattatcattttggctttcattagaactttgtaggatgctacagtattatttctaatatagacatttcaaataataccctggctctggtggaaagattctgggagaagcattcagagagcagacgttctttattaagttcagattttaggacttgtctccaagcgatctggggtcagcaggctgtcctgaactgtgcaggttgtttaacatgacaaaagatgtggtcattgcttaggtccacctagaaatccatcacttctcatttgtaagccctgcttcatttcacaatatgtcctggtctcttggacccacttcacatggtgttttaacttttgcttctgcagggtggtccaactcagactcttactctacctttctctgtgagggtcagaaatcatatagttcccctgtagatccaaacacttattctttcttcaagagaacccatgagaggactgtgtaaggaagcatagcatatcataagagaaaccccgatggggggggggattaatgactctttcatattccttttaagaagtagcagcaagtcttctgcaggacatgtgcttgtcatttggtagtaaatttcttgacagagaagggagatctgattggaagagtagccaaagcaggtaaacgtgatggtgttaaaggaaggtggtagttatttttgactgagctggcaaacactggctgtgttagagacatgatgtgagaaagagcctagcatttgcctgctacagagaataaatcctcgctgatggctgatgctgtggtttaaacgaacgggacaagaatattaagcagggaaaaccctcctagctataatgagtggggagtccttatgcttggatgaagaaaacagagtaatcttgaacctgcaagccgaaagcccggatagcttctgtccaattttctgtgatatcccctgggattccctccgtattttgagccgagccatggacttggagggtggtgcgttcctgcaagttggcagacattcagggaacagaatgcctgatttgctacttgctctgcatatgccaattgaactgccaagcaggcattgcctgggggaaacactagctccaacggaaaagaactctagttagagagattaggtatttatcaatgtcagctattattatacatagtgttttaatttttaaaaaatttatgtgcatgacaaataactcaaacaataaaaatatgtggtaggatgcaattctttgacccccacatcccctgctccccagcttcctctgcctggcaggcatagccccatttgctaatttcttatgcaaatttataatgtgtacataaacaatcacacagctgcttttagctgttacttaccttgatgattttcgattagaaaatcaatttaattgtcatgattataatcactatggtttttttttttttatttttgtacatcatcagttgtaaatgtgattgcagtctaggggggagatgttaatatttctgttgcaaacatagaaatgttattgttatcattttgaaaacttaataatttacataagacatattcattgtagacaatttatactggcatccagtgtgatgtaattttaatgtactcacaaaactattatgagtactttgtacttgttacatgtgattcctacctcacattcttaaagatttgaataatatctttatgtgtcgtgttgcttgtaatttagtgttttctctgaacattctttacatggttgatatcatgaacacttcaagaaaattttgtaataattcaaattatctacttaggctagcttctaaaccctgttgtgttgtaaaaatattttatacatctcttactctccttgggaaaaatccctaaaagaagacttcctgaatcaaaagaatgaattatattattgtaaaatcatatactgacttccaggtgtataattactcaaagaaaatttcaatgaaacagtttatgtcataagtacacagtccaggcaatattttgtacctctctcgtgtttgtaaacatgtaatacaaggattaattcaagtatcccttaaatttcaatgtgtgaaccaagaagaaaagtacttggagcccaagatcttttcttgtttgtgttcttttacatggcactaaaatcaatattctgtgagagaaggggaaccttcagggcactgccgtcttgcatccatggcctgggagtaagagtaaattctcactgtgctggtgcctgccagctcttataagcagctcttataaccacagccacgtgtgctttgtctatcttccctgtttttacccacaactttcaaacccaaccctgccacctaaatccagttttcctgatgaatgttgcttcagcaactgccaaaatttgagtccagaaattatgacccaaacaattggcttcttgtgccaaaaatatgtctttttgtttgggggggcgatctttttttaagggaaattctagtatttaaggtttattttatttgtatttgtttgcgtacacacaagtgtctttgaattgaatatgggtacttgggagaccagtaaatggggttaactccccagaagctagagctgcagacagttgtgagccattcagtatctgttctggggctgaaactctgtaaaagcaacaagtactcttaatgatgaaccatccctctgcccccaaatatctagatttttgaaaatctatatcatcaatatcaataattgttttattattaatcattactgttgtttatatctcaaatgatatcccccttcccagttacccctccaaacctccccatcccatctgctctcttcccctttccctttgcctctatgagggtgctctctcacccacccacccatccccaccccaccgctccagcatccccctacactgggttactgttttctagtcctcttctgaaatggacattaaaaccactcatgaaatcttaggttttagcttgtttcatatgtctcttagtaatatcagaagctgcactcataaagtctcaccatcatgactacccaaagataagctgaataggaaaaaccagcagatgctaaagtggatgaggagaagcttatgagacttcaacccttcacaaagaactgcaggcatctgaggaaaacagcgagctggaaaggtatcctcttcaggaaataataacccccattagttgttcagtgccaaatggttagccctggaaacatacataaaagtaatagtatatggactaaatatgttatatttagaaatgtgtgtgtgtgtgtgtgtgtgtgtgtgtgtgtgtgtgtgtgtatacattagtgaaaaaggaggtcaaagatgttaaggaaaatgatgaggagtatataggagggttaagaggggcaaatggaaggagaaatgttgtgattatattatgatcccaaaaataaaatgtaaaaaatttaaaatgtatcagtatcaatcttccttgggccttgttagtggttcttctatgacagtgaagttgatacagtcttggtcggatgggtaaaaggggtaggaagagactactgactctttagctattagttatacaaatgtattttgtaatgctacccatgttcacaaactctttataatactgtgagcaacagaaataattagattagcactgggcttgatcagcctacataatctcttgccaagaatagactgagaactgaaaagacgttagtaaatatgggttccctgcctttactggcaaaaatattctgaagcattagggtttatttttataattgaattactgttcagtcttatttccagttttatacagtgagtgttagtgaggaatttggtcggctccaataaagttgttatttctttccatttataaataatgaatatgcttaaaatgatcattttttaaaaatatttttattaggtattttcctcatttacatttccaatgctatcccaaaagtcccccataccctcccacccactcccactttttggccctggcattcccctgtactggggcatataaagtttgcaagtccaatgggcctctctttccagtgatggccggctgggccatcttttgatacatatgcagctagagtcaagagctccggggtactggttagttcataatgttgttccacctataggtttgcagatccctttagctccttgggtactttctctagctcctccattgggggccctgtgatccatccaatagctgactgtgagcatccacttctgtgtttgctaggccccagcatagtctcacaagagacagttatatctgggtcctttcccaaaatcttgctagtgtatgcaatggtgtcagcgtttggaagctgattatgggatggttccctggatatggcagtctctagatggtccatcctttcgtcacagctccaaactttgtctctgtaacttaaaatgatagtttaatacttcattttcttggcttcaaaactctaaagaacacaggtatttaaaaaatgagcattttgatgtacaattagtaaattatcagttttgttcccagtatttctcatatgaggaactagaacaagtttttaaatctatcatttctcattttaaaaattaggcttcttaaagactaagcatttgtatgtaaacaagtaggcaaatactgtgtgcgatttaactatatgccaccagtgtttgtgtggtgaatattttgaggcagtttggcatagaacacatggaaacattaatgctgcactcctctaagaagatggtgcaaggagtcaaatttgtcatggaatgttttaattatctatatcagctatcagggcaatccaagagagcctgttaacgctaatattccattgccactcacagttaggaaactgaacaaggttgaaagaaatggctggtctttgcggtatgtctgaagtctctgcttgagttcactatctggaagatcttccacacaaacaactgatggttgattaccagcctcctgtaagatttggaaggaaggaaaagcaagccaacagctttgtgggataacttgcctgcatctgcgtgtttgcctttgaaaagcataaatctctgtggaggaagggagtaggacccagtaatgaccatgtaaggtattattgaaaaaatcatgaaagcttaggtctggcaatggtgagggggtgggggagagaggactgtgggaaatatgaaagtttaatagattgtgtattgtggggcagagggctgtgcacagacagcctagtccctggaagagcaaaaatctggaatcccggtgacctggtgggtgatgatttccaccttcatgacacagaaggtgtttgaccacacctcctgggcacctggctcctgtagcagctacagcctcccacacagcccccctcccccctcagagaggtaagtggccattaatcgcataggagcagcactaagtcctcccacatgcaaataaggttttcccaaagctctcagaccaaaccaatgagaaatactgctatcagacccttacccaccccaaaactgtatataagaatcctatccggaaggattaaagctgtgtgagaactactctgtcatctgagccttctgtcctaagagctttaacacttgggaagaggtctgctctcccgaaatgccacctgaagctccatggcactcctcactggctagtgggcctcctgtagccccagcccgaccctactcagtgcagggcacagaataacctagtaatctggaaggcaggcagagaggagggtggagccaattgcagcagcccagcagaagcgacctccccctccctgcctgaactcccttcccttccctggaactctcacactaggccaggccagagacctccatggagatcctctggtgcacaggcccagtgagtgttcataggcacagagaaagaaaggcaaggaattcccgtattcagaggagaaaacagacatatttaaacaagacataggtgaagttttgctgtgcgtatataaagcaaaaacagtttggctagcttcttataatttttagagaaaaagataccatgcggcattgtacagctgggtttgcacttgggaaagatgcaataacttattaaatgtggcctctttttagatgaagggaaacagaggaggcctccaaaatgtaggtctcatctgctttcagaacagtttaatagtggatgtggcctctgtggcctgaggtttggtgacttgcaagtgggcacaaagcctcctttagcccctgatgacatctcatgggcaggatgggctgccagaatttaggtatcatgtgcactcctcacaaagccaagtctgctcgcttaaagaggaggactttcatggcgagcttctattttcccaacatgttcgctttgaaatggtcttttctttctgaaatgatgccggtggtttcaggttttaagtagcagtcctgaaaggaatacaaagttgctggtcaacatcctgcagtctccaacactggatgttcctccaacctgcaaggaggttctttataaaacacggcagaccctttgctttagataacgtttattagtcttgagagtaaaagaatagcgttaagtttttttggaatacatggaaaaatcacatttctctatttcttacaatgccaaaggattgttcctgggttattgttttctgctactatcaatatctgtcactgaggctgagattatctgaatatgatattatcatctttctcacctgagtttgtgaggggtaaaatgttaatacttacaaagaatttagagtcatacctggtataccagatagacttctatattgttattgatgatatttgataatagttcctttgaatttttttttgtataagtaatcaattttgtgtttctcttggcctaaacaaaatgttgttttaggttcttaacctgacttgattgttctttcatttttttctgcctttttttctgtctttttaaaaacatttctctgtctatctatctatctatctatctatctatctatctatctatctatctatctattaaatgtgtaggggtgttttgcctgcatgtatgtctgtgcatctcatatgtgactggtgcccatggagaccagaagagagcattgaatctcctggaactgaagttacaaacaactgtgagtctccatgtggctgctggaaattgatcataggaatgattcctctagaagaaaatttagtgtccctaatcactgaactatctctaattaattgtaaataactagtactttatacaggtttagttttaagttactcaagtttgtaataaaataaaccaacttccagggaaaacaaaagatacaaacaaggtaaacttcaactaaatataggactgacaagaaatgttttatcctacttcatagcctagagcagtggttctcaaccttcctaacactatgatcctttcatacagctattcacattgtagtgacgcccccatcataaagatattttcattgttatttcacaactataatttgctgttgtgataaatagtgttttctgacattttgggttgacccctgtaatgggggtcacaacccacagggtgagaaccactgttctgggctgagagggttgagaacaggcagccatggtagtaacagaaatatgtggtagatagaaaccacttgggtgccctgtataaggtcctgattcccaccacagccttcacccttcaccctcaccctctgccaaataaagaaaaggaaagaaagagaaggggtggcagagaaggaaagaatggtaaaacctgaaaagggagaggaggagtggaaaggaaaggaggtctaaatcacactgagttgtatcatagatctttgcttcttagtttagctcatgagtatgggctcatctgtctgcttagcatctacccacccagttattcatttcacagacacaaagacacatgccatccacatgtaacacagcagtccttcaccttcctgtaatcatgaatatattttcccagactccaattacaaagtgagctgaattataaattctccaagtgtgacgtttacaatgatgcccacaatggtagcctcccttcctcttctgccctcctcccagcaagagacagatttcactacccagctactgggccagaaatactatactaggaacctaggtgcatgatagattggtaaacttggcccaaaggtacccagctgttgtctacagatgtcatgggttatgtgaagcactcaaacagtaagagctgagaaataaattatgaaggaagaacaaaaaataaaaagatttgttaaaacaactgacatttggaggaaatcccacaaaaaccaacctgaatttgtctaccctaatgaagttttaactctgttgtattctgtatggattaaattagtttaaaatggttattgttcactaaaatatctaacatttgttctttatcaaaaactgtatctgtttccatgtttctcttgaaactaatataaaatgaacaaacagacaagtaacttctgcggtgtccacaactacgagagaaaatgaagattcatataaaatgcacctggaacaggtctatacaaaaacaaggtcgctaggtctgctgggcttagtaagtggataacctgtgccattttaagtctaaaacatggcagatgggctaatgagatgattctgtgggtaaggagctgtgcaaagccctatagcctcagttagatctcagggacacacatggtaaaaggagggaattggcccctgaaagttgtcctctgacttctaaacatgcacatagtgcataatgtgctctctctctctctctctctctctctctctcattcatatatatgtatatgtgtatatatatacatatatataattaataagatataacaaaccataacagattatcttttgagaaaagttgtcttttaatatttagagaaacacacacatacttgtgtttagcatactatgaaaactgaaacagaaaattaagtccacacaggggtaagtattttttttgtttgttttttgttttttttttctttttttttattaagtattttcttcaattacatttccaatgctatcccaaaagcccccccacacactcccctacccactcattcccattttttggccctggcattcccctgtactggggcatataacgtttgcctaaccaatgggcctctctttccagtgatggcctactaggtcatcttttgatacatatgcagctagagtcaagagctctggggtactggttagttcataatgttgttcctctgatagggttgtagatctctttagctccttggatactttctctagctcctccattgggggccctgtaatccatccaatagttgactgtgagcatccacttctgtgtttgctaggccccggcctagtctcacaagggacagctatatcaccgtccttgcaacaaaggcttgctagtgtatgcaatggtgtcatcgcttggaggctaattatgggatatgttttgtagcttaactagagaattaatgatcccttcatatggtaattttttaaaacatagctagaaaattttattagaaatatgcatagttacacacacatacacacatatgctcctgtaaaaattatttaccacacactaagtgaataattatttgctggctagttttatgtcatcttgacacaagccatagtcatctgagaaaagggactctcaattaagaatatgtctccatatgataggcctatacataagcctttggtgcattttcttaagaagttattactgtgtgaggactcagctcactgtagatgatgccagttctgggctggtgctcttggtactctaaggccataggaagcaagccagtaagcagcactcttccacggcctctgcatcagcttttgtctccagatctctgtcttgtaagggttcctgccttgatttccctcaacaagtgagttgtaatctgaattaagtcccctccttaccaaagttggttatgatcagtgtgttttatcagagcatagaaactaagataatcatatactgcttaactaaacatactttacttccatttaaggatgaaataagaaaaaggatataagctataactaggtgaagatattgatcagattagaatgttcaaggccaaccagattgaacagataattgggattaaaacccatataatgaatctcaactcaacattctttcatttttgctaagccatctaattaattttcaactgattatatattccttgcgttgttaactttcttatatgagtgtactggcttcctaaagaaattgcaggcataggttagagatgccataacccacaagctctagagaaagcctttgcaatcacaggggctcagcattcgtttgttaattatgagcttttagcatcacagcagtcaatggaaaattcatctcatattttgcctttccctttaggtagcttagtatagaggaacaaccagccattgcaagccgtgggacaaaattagaattgcataatgcatagccactgcctcgtccctctgcgattcctgggacgggagcaggcaagttttatacttcatttctgcaaatgaagaaaatggtttaattcatctatgcttccgctgggtcgtgtacatacagaatttgtatttgataccactcaatcacaaaagaattccattactaatttagcttattgttgtataaattcagccataacccaggccataaaatgatcccaagaatataacaagttcccatagggaaaccctggtagagcatctcaagtgagggctatttttagctttggataaaggcttttacatcaaggagttgtgcgtacaatgcattagttgtcccattacctacaatcagtaacctaatatttaagtatattttttttgcatctctgtcagaatgtactggtgaaataatcattacaaataactacaataattgcctttggagctgctccggagttcatctatcatatcctttaagatcatttgcctaaaaaagcttctacttaaacgtgtcatttaaagatatgaatccctctttgttcataaatgatttttgcctttcaagaatgtaccagcgtttagcaagtatgaatagcctaagtctgggcttttctcaatgctcaggatgcagtgagtgtcctttggtgcagagcctgttaaaagctcaaaatttcaaaccgttttttgattcctcatcttgacttgtaagagaaatcatgattaactttctcggcgcacattaagtttgacataatgagctcatttcaaacaccattgtaataatcgctaagcatgggaatttgtgggctatatgagttctaaccctaactagtatgttgtattctgtcatggtatttggtaggctgcttgctcaacatgatcctatcatcttgacaggatctagcatcatctggaagagaagcctcgaagcaggtggtatccaacctgtaggtcatgacccctttgagggtcaaggaccctttcataggggtcacatatcagatatcctgcatatcagatatttacattatgattgttaacagtagcaaaattacagttatgaaatagtaatgaaaataacttaatgcttggagggaagggggagtcaccacaacatgaggaactgtgttaaagagtcacagaattatgaaggttgagagccactggtctaagggcttatctaggttagattaactgagataggaagagtcaccttaactgtggcagaactattccttgagctggggtctcgggctgaatcaggagaaaggaaactaactgagcggcttcatcaccacccactctcagcttcctaactgtggaagcagcagctgcctcctgctaccgctgtggcatctcactgtcagggattagaaccccaaagatactttttattttgtaagttgcctttgttctgtatttttgttgttgttgttgttgttgttgtttcagcaaagtgataagtaatacacccacattataccagcttgttttgtggaaaggaaaaaagggaagggaaggaaggaaagaaggaagagggaaaatgaaggatggagacggtgttcatctgtcggagcttcagattaatttgatcagaatgagtatcaataaccagaacgtcccagtttggaaatcacgtgcagcacataagggtgctcagacaggggttagttttgttgggacactaacctctgtggtggggtcctcattgtttccacctgatgagctgtttcataagatgctcagacttgagttttgctgtgattagctagccagactgctcttttctactaactgcccagtgctactccgagtccttcacagcagcaatggactcaccagaccagattcaggccagtatttaaggctgtagttctcaaccttcctaatgctgtgacccgcttcttgcacacagttcctcctcatgctgtgatgactccagccatacaattatgttcattgctacttcacatatataactgtaattctgctgttgttatgaatcctgagtaatatctgatatgcagagagacttaggtgatcactgtgaaaggggatcatgacccacaggttgagaaccactgctttaagtggaagcaattatgaaggattaactgttgtaatctgaaaagcctaaggattactctggatagagtttcaaaacggtttccatgtttgccaatgccacctgatcactttccctttccattacttgcctggcatgaggctttgaggacacttgtcaccacaggagcaatgatcccttttatattgtattttgctttttatctgacagcatagatgacaaatgctggagagaaaatcaaaagcaacaagagcgtacactggtagtaaggggtaagaagaaacagagcgttgtctttcgaagccaaacttagcagaatataaatcgtccatttctgtttccatttcagtttcagagatgaaactgtccctagattaaaagatcacagatccccgttgaatcctttctctcttaagtgagacctctttggaaagcaatacaaacaggatggtaatcctagctctgaaataaatggttaggctgtgctctaagggcttttctgtgtctttctgggtgacttttaatgttttttttttttcgtgaaaagcaaatgattcaaatgttatatttcatctttcattattcttttcaataatatatgatattctcttttgacacactcttttctaaatggtagaatttatggcaaattgccatttcaattatttattgtgatctactaatgcagtattgactacatcaaaactggaaaaattaactatttctacatacctttgatgaaatgacagagaaacttgccaaaataatgatggagaatttatattgctttttagtgggttaatatgcaatatgtagttaatatgtaatatgtaatttttcaggtattatttctgaaaaaaataactaagatcttagtaagtcacatggaaaaaataacactacagccaaacgtggctttttacatttcatgtaatctataatctttgtgttatttgggatcaaacacatataggttcaactattgagaagatactacagaaagatgaagagaagaggaataaaaaaaatgggaactgagggaaaagatagggaggaaggagagaagaagatggtgtagaggatgaaagttgtgcagcccgtgagcactggccattttataagtggccacagagtgtcttcagctcaagtgagccaaggggtaattgcacatcgtgtgatcaagaagagcgtaggtgagtctgaatgtaggatttcctgagagagataaatagtgctagctggaaagagagagaatgtctggttgtaaaatctgtccaaagagagctaaaaatagctcaagtacagaacctgttcaagcaagactgtagactcatggatctcccaaatcatctacaacttaatgctgcatcgttgagctaacatctctttagtcttcccttatgctcagccaagttccttgagaggaagtagaatttctctggacactttgagtgtcagtcttgggctgtcccctgggtacaagcctttcgggtttcttccacagacatgtcagcatattaatgcattctttggctccaagtgacctgctctccctttatttcctcatttgccattcatatcctggcctcctttggcctgcatattagtcccctgggccctgtgtaagtgcttccagggcatgcttctaactgcacagtgactggactatgactaaggtactttgctattatgaagcagctgtgcttagaattctgcaacattgctcctaggagtcgaggaggacagaatgtccagcaaaggacaaatgtactaaaagagacctaagaaagagcccagttgccaagtgagctgcctcccttctgtgcactgcacacataagtcatcagtcacttggacttcaggacatttcaaggaagggaggggagaggcctcgaggagggtgcttttcggatagaaggggagccctgaaaaggaaataatgcccctgagagacagaggctaaatggccacaaatagatctaagaagattgaagcctagatagactataggtgaaggttctcttcactaaagggtatactcagtcttgcaggcaagttaaaaacatcattaaatgaagaaaatgggagccaggagaagcatagaggtttcaaggggtaggcaatagatatctttaataccacgtggttaggttttcattgctgaagccaaatgtctttagcaggatgccaggagaataagagctctttagcaacttgcattttcctcctaagacaaaacacccgccctccctgtgtgtcagtgtcctcatctatataaagggttaataataattctcagcaaatccagttctcagcactaccgcctaaaaacaccccttttctatgacccttctgacactcttctcttaatacccaaactgaggtctgggacatacaagataacctggaacctttctctccatgtgaatgcatcatgcttcagcatcctatattggtctcctggaaatgctggtagaagggttaccaagagcaagagagtcatcttttctccaagcgccagctcgcatcacttcccagaagcctctgggaaaatgctcagagtcatgtcaaaagggctacccaaggctgaggtacacaaaaggaccaatttttgtcatgatagctcaaaggaatctctggcctcattcttcactgaagctagagtaaatcaaacaaacgcaaactctaatggtttaaaaccaccacggctgcaagtcaccctaaggctaaggagcaagagagaatcacttactatgtaaatccagtgatgtgggaaccattggtacttgagttaaaagttcccctgcccactcccttccaatctcactccagatctgtgtggctaggagcacttcccaaaggtcctgtcaggaggtgacttccaggaaggaatggttccagcattttctacttcaccttccctatctccctatcttaaggctaagccacagagtgataggatagttaagagtggaatggggactctattcttgccaaataaaatccccctctgtcattaaatggaatgccagccttaggcagagcatgctgggcatattaagaccttgtgcccattgctcaagctcctgaggtgtttagtctgggagtgataagcctgggggaggtcagggtactgagtaccctctttctcactgaacatagttccttcagtggggacctccatcagttcctgtgtcattgcccccattccctcctcctgagcctggccttagagatttggccgggaggaaaaacagctcataaaataaatagttcttaatgtcctcccagactccctgacatcattagtgactgcactcgggaaagttcagtgctgagactgacctccagaactgcaaaagctgtggtggacggcaactgggggagagacaggcaaaactgcacactacgctgcaggggagaatgcaatcagggtgggagcaggaatggacctaagggaaggagctgggaggtgttctgaccgtgtcacagcaaatgcagaacactgtactttgaactatgctttcaaccgcatggaggcctaattatatcagtttatggagcccctaaagttttcctgaaagcagtataaccattagccaccacctagtggactttaaacatctgagtatgatcaaagaaagggaaccctacccatatcatgcccaagtcaagatgtacacagaggcgttcctctctgggagcagaacttaggcatgttggatatctacttttattcagaaaatacattttatcgaaaaataatctaggcaactattaaacattaatcaattcatagtagaaagcccaaattatatttgtaagtcaggctcaggtccttataatccacacaatatgactgaaaggagagagtcaaaggtagaggggaaattacactgctcagctagagggaggtagaggatgagttaggtcttggaaactgaagctttggggaatacaacacatatttattttattttattttaattaagtattttcttcatttacatttccaatgctaccccaaaaagtcccccatacactcccccccctcccctaacctcccactcccactttttggccctggcattcccctgtactgaggcatataaagtttgcaagaccaatgggtctctctttccactgatggccgactaggccatcttctgatacatatgcagctagagacacgagctccggggggtactggttagttcatattgttgttccacctatagggtcagcgcacatattttgatggataagtaagatctaaaatattataagtttttgttttttctaatttttatttctagaaaaacaaatgtgttgtgtcatgctttctaatgtaaatgaaacaaaataaacttattaaaaaatagactgcttactggtggcaaagtagagtactcagagttcctaggtaccatctgagatctgtcttccagcaaaaataccaagacatggatagaaatagcaaagtacatctatttacaggaaaaaaaaataaacaagcaaaacccaaaaacaaaaacagagatacggattctaagtgtggtctgttgttagattgcagggccgaggtagggatggtggagggtgatcttaaaatagctaattgcaagcaatcaagcaatcatatccttcaagtgtgaaaatctaaacaccacttttattatttcttcttctttctctcctctttctcctcttcctttcttccttcctacctttcctttcttctctccttccttcttccttctcctccccctccttttcctcccgattcttctttttcttttacctctaggtgatatctctacatccagattccattccctatgcatcttaatgaattacggcttcctgccaactacaactctacctatcactcaatcttcttggaatgtctatgcttacccaaatggacctctgactaagcatggctaaagattcactgcatctgtatctcagtgtggccactcctgatctcagtgtgccatgccatgggaggcatctcacttctaaatgagaattctgagaccttttagagcctcttatcacttttggaagccaagttcttcggagtccccctcccaccttcaccagcaactgttaaataaagataaagctatctttatctcttacctggatcactttaaaagtttccaaaacaactatgcacattagggacattgtcctacctggtgtctagtttcaatagcttacctagaaacatcttttgaaattcacatttaatcatgatgccacatttgtttactaaagttctatggtgaggggagagccctctacccatagtagcactcactttctagctgcctatttcaggttttgttttgggaaaatatctccagagaagattctctctcatcagagagcagtccactctatgcttactctctctgttttagacttctttcagatatgcacatgtgtactaccctttgtctcagggatgccctgtttatgtaggaaatagatccttctttgatcatgataaggggctcatggtaggagtttcgtaatcagaattcaacattcaagaggaaatctctgtgtcacggtgtggatccctctcataaggacatcacggtcatttcatggcttccattccatttacatctgagatccgatctgcaatctttatttttttttctatgaagttctctaaagaccactcttacctaactccttctcctctgccacactacacatgctccctgctccccaccatacatgagcctgtcacacactctgcctgaaatccttacttctgccacacattaccttgcttcccctcaaagaatctttctaactcaactcaaaatcactttctcagaaagtgcatcactgcatcactgtcctctttaaaaggcagaacaactttttttcttaattgcactgattttgttttaaactgtatggacttggttattatttgatgagcatttactttctctactgggttatggacacagtgagcacagattcgtgggtgctactcacccatgtatcttttagtgcctaggcaattgactgtctagtaggaggtgttctgataagtatttttaagtgtgggttaaatgaagagcctcagaagtatgatatatgtaatttcaaatgtagcataagctaggttttgctatcataatagtgtcttccataacatatacactagccacagctatccatgaacgtcagtgccataagaaggttgatttctcattcactctgaactcctattgtcctgtaactagatacacagtcaggactctgatgtggaagctgatggaaactactacctgaaacattgtttaacattgttttcagtgtcaagaatagtttgttgttaatcaatgccccagctgggaaaccaggtacgacttcatctccatacacaatccagaaggaacacacagagtcaggaagaaccccatggctttctgtacatttaagggaagcagtagatgtcatctcatatgcaaaaaaaaaataataataatcagaaatatatggtcattcatttcaagacttcccacagacatactggtatagttctgactatgactagggttaaaactacctgaagggataacagaacatttcaagaaagcatgacaaaggactttagttaagggatgagatttgacagtctaagtagttgtagtagaagaaactgcaggcatggtaagtaaagtatgcatgaatatgtatgtgaggcacagtgatgatgttcccagatttgcttaagagtcacagggcatattagaaggataggtttgacctttatgcacactcttgatcttatatattgttatcataatgaagaaatagcttcagactactgtatttagtatgtggcgtgagcaatagcttgaagccacaatactcttttcacattcaagtttctagttgtcaaatgcttttctctcaggctttgttcattggcctgatgcctcagaaaaagctgagtctgatatagcagatgaaggaagctgcttataatccctcttttcatgccagtgcccctctgtgagcaagcagatgctagtgaccctgtcagtgtgagagctaaatatctttaatctcacctgtaattggtacttccagggacttaattgaggggagagacttacataaagtgaaagttggtgtagaataataggctttgtggaagctcaaatctagttgatggttcctattcagtaaatctatccctaggagctaggagcacttagtcaagacatttaacctgttttcaccagtactacatcggtgttgaaatagtaatgtcctgccattacagcatcactaacagagaacagaaattctcaaagggaaatttgatgagagcaaaagtatcttctcacacacagccaagaatttgctgtagagtaaccatcagtgcagcgagttatgtcaagccttttccttgatctggaaggaagcacaatgttcaggatggcctccagtcagtctgcaccacttcaaactgcagccactgttctcaaccctttgatattgaggcaaatcatttcatcattcccagtagtgattttttgtggttatggagtgaaacactatcactagtctgcatattcatatgttcaagtcccattcccattgaaagtatatttggaggtacagcttttagggcacaattaaggtataatactggtggatttttaaagatgagtaagtggaggctgggcttcccagttggcatacgtaaagggaaggccctatgaggactcagtagaaaggtccctattggccacctagatgtaagtctcactaagaccaaacatgctagctccctaatctcagtttgttcccagagctgtaagaaaaaaaatgatatttaagcctacatttcctgctctgtaatattttctgatgacaatttgtactggctaagacgtacctaaaaacataggtaatgtgtttgggggtgggggtggctcctgcctgtattaccagtgagacaggatgtttgtcatgagtttgggaccatcctgggctagagagcaaatccctgtctcaaaagcaagcaaccaaccaaccaaccaactaaccaacaaacaaactcaagactcaaagccaaaggtacctgctagtgtttatgtggtgctattgatgttagctaacacaagtttattctcattccaagtctctcgtttgaaagcattctattgaggaattctacttagcaaataggatagccctaaagagcttagattctgggctttgcttctcctaaccagatggccttgtgaagacagctagtttatttgacccttagttttcctgtctaagtggagaccatcacagtgctgagtctccctgggagctgctgtgtagattagagaagatgtgtatgcaaccgtgcctggggctttgtcagccttccattcctgctgtttacctcttccttggagcaagccagagcctcagggatttgcattagcaaatgaaaaacagtgcttccagaaaacccttgaaccctatagagaagcaaataaagcaatttctccccaaacacaggtctctaaccttgccctcccaatcccttcttactttcgatttagaattaggagacaggagctttgtccattgtgggtttttttttttttctttccaaaatggacatttaaatgtctgttgtttcaaaaacaaacaaacaaaaaagcaataaataaataaataaaccaaaaacaaaacaaaaaaaaacaaatgaaattcctagggttcaccctctccctataaacatcttatttaactctttaaaataagagctggttgtaactactactatgcagtgaaacagagagagggttttttattgcgggggggggggaggggggtgttttgcttcttatttttcttactgctgttgagtagtacattagaattaaaacacagtctcacatcattgttcttgtggaacaatgtgaagttgggaactataactagatcactgaccatactggtagccataaatattcttaaattcgagtgtagacaaaactgttttgtgcagcagccctgctcaaactttaatgaatgaatcacacctgaaggtcacattaaaatgcaggttctgctgcaggaagccctggagggacctggacttctccactctgacctcctcccagatggtgtcagttggctgagcattgcccattctctccgaatggcccggaaggagctgattttattaatagtgacttggaagatttttttactaagaggtttgtcttatttgttttctcatttcgtatttacaaatgtattctagatgcaggatatagaaagaggattaaaatccaccttggcaagactcaaattgcttcaattactttctccatatgttaagcacatgtaactcatttagaaacccctttatacaaactcatttatagtctgcccctttcccatcaaatgagagtgcatatccctttgatttgtgtttgtttgtttgttgtttgttgtttctaccatgcagaacacattaaatcacctcctccttcctgagacctctccctgcgttttgacttccattgttttctttaaaaggaaaactatatgtagttagtcctgaaccaaatatgaatggctatggtacaggatcatggcatcaagcctgcctctgctacccaagtgctgggatccaaggtgtgtgccatcacacttggcctaatttttaacaaaaaggtcaaaaacaacactagggggaaagcaccctcttccataaacggcactggggaaactggataaaaacctgtagaatatttaaaatagatccgtatctgtcgttaattctaagtgaatcaaagactttaatttaaatcctgaaagggcttgaggagaacataggaaatgctctctgagagtcacgtataggcaggaactttctgagcagagctcccagcacaggaaatagcctcaagatttaacaaaagggactggctgaaaagctgcttcagagtaagagatattatcagctgaggaaatagcctacacaaaagagaaaaatgtaattgtgctaatttctttttcttttctctatttttcttttattgaatatagatttttttcgtctaatatattctaattatggactctcctcccccacaactgttctgaggagaatatttttgtgagctatactttaaaaagggagttaatatctagcctatataaaaaaaatagaaaaatacaacaaaaatataaatataccaatcaattcatgagctaacgagatgtcgaaaaccacagatgtaaagtactttagaaactgttcaatatccctagcctggagagaaacgcagcttaaaactactctgcacataaacttgagagatgtttcagcccttaaaagtgcatgctgctcttgcagaggtcttctgttaaggttccatatctgtcagctcacaactttctctaagtccacctcccagggatccagcactttctgttggcctctagggtttgccacacacaaatgcacatatacatcacatagagacatacatgcacttaaagaaaagcaaacaaacaaacttctttgaggtgaaagctgtttggcagtgggtggtagacccagtttcttctgtgggatggtttctcacagattgcctgtactgcagtgcatagcccagcagcacgcagggagccacagctctaagtgaactcaatggaattataaacttaaaaaagaaagaaagagagaagatatgaaattgggaggggatatgatggaaggggtggttgagacaaattggacatgggctagaggatagatctgaacaaaataagttatatgcatgtatgggattctcaatgacaagataaataaatatatatatatatatatatatatatatatatatatacatatatatatacatatatatatacacatgcatacatacatatatgtgtgtgttaaaatatatagatttaaaatatatgtttaatatatgtggtatattataatgtacatgtatatgatatatatgtctgtgtatatatatatgaaaatgcatgaagttaggaaggaaacctgttgagagattcttgggtgagataaaggaatagagaggtgtggttatagtcaaaacacattgtatacctatatgaaaaatttaaatattaagtaaaaatataaaagcactactgtgagaaaggacaagagattgtgtgggtgaggagaaggaggaaaggatctgagaggagttcagagaggggaaggaatgtgatccaagtatattctaaagtaaaaaattgaaggcttcatttcgtgccaccagtctgaatggccgtcatcgagaaggaacaacaataagtgcgagcaaggctgtagagaaaagcacgtgcttgctcacaaaaggtagggggagtgttaccctgtacgccatcagagacatacgtatggaggcttctccagaaactagaattctaaggacacatgtcacagctctcccaatcctgcttccgtcacacgtccacaggggtctctgttttaacacagacatacttgcatattcacgtctattgctgctttattcagagcagcaaggagacgcagcccagactgctgtggacaggtaaatgaataatggaactgtggtccatcgatagacttctatgagtcagaataggaaaatgaagtcctgaaagtttagggaaaactgcatgttttagctgatatgtaggttctctcttatgatgtgtatgtatttgtatacaagggcacatggatctgtgtgtataggctatgactatgaaaatgagcgaggcaggataaacagatgttggggaagtgggagacatcaaaaaacatcacaagtgacatgacaagaaggaagggaggacctggagtgggtagggaggaggggaagaggggaggaggggaggagggaaaggggaaagtcagcaaaagcaaattttgtttgagtacattcttgttaatgttaaaactaatactgtgtatgctaattcaaaacttttaattcataaaaataaaaactaaaataaccttagctatcataatccaaagtctgattttttttctatttttctctccatggttgatgtaatatgtggcatttattatgggttaaaatagctaaagctaaaatactgagtaacatagcctatggcctatggtagtcctgtaatgaaggaacaagcttttcagctctcctccacaggtatctctgtaataagactgtctataatttccttatctttcatagtcatttatgattaatgcctggaaattatttgagatagtcttattattatttttatttttattctggctagttttcttttacagctacgacctcacgtgaggaatatagtttgaattttagagaaaatgatctttgatgtacaatttactataatcaagatctccaactaatccttttatttgtcccatgctttttgctttttgctttatactatatcccagtttgaagatacaaacatggaatcacataacagaagtcagatgacatcatcattttcaatgtccccaccaaataaaattgtccttctctctgtgacagatattattagtgagagggacaggaagaaaatgctagacttgtaagagagaaggattttatagattttataggcatcatgaatcttttttattttacaattataaagaaaaatggagccccagtaggaatcactttgtaacatggatcatttactttcttactggaaaaccaagcttattgtttaagtaatttttaaaccctggctctatgaaatcatgagacacactgaaaagcatttgggcaggaatcatacttctaagacagtgtttcccaacccgagtattacaatccttttggagggttgagcgatcctttcacaggggtcgcatattagatattaacattatgattcataacagtagcaaaattacagttacaaagtcacaacaaaaataactttatgattggaggtcaccacagcatgaggaactggattaaagggtcacagcattaggaaagttaagagccactgatcctaagctatagccccaagttacaaatttcctccttttgttaaaataaaatgtttctctaataccctcattgtaatatgagtctgttttaaggttacaatactttttattggttattttttttatttacatttcaaatgttatccccctttctggtttcccctctgcaattcccctatcctatttcccatctccctgcaactatgagggtgctcctccacccacatactcacttctgcctcacttccatagcattcccctatgctaaggcattaagcctccacaggaccatgggccttccctcccaatgatgccagataaagccatactctgctatgtatgcagcgggaggtataggtccctccatatgtactctttggttggcaatttagtccctgggaactctgagggatctggttgttgatattgttgttcttcctattagggttgcaaactgatttagctccttcagtccttcccctaactcctccattggattcccggtgctcagtcctatggttggctatgaccatacattattattttagtaaattttcttgttctgaaatgtgtattctattacatataccttcagtgagatctcttttggctctagcatctggccaagtttggtaaaacaccactaacaaaatagcatgtatgttgtcatgtgagactgttgtatatatatggtctagaaagagtcaaccccaaatctttgggtatacctaacaagaatcaataaagtagaagttcctctaaggtggtcagaagaccaagtgtggatttttagaatctcccatgccttgtggtactggatttatcatatggagtttgagtcttccagattactcctataaattaagtccctcctaaactgtggagcttctagacatctttacatgacaggtagcaatcaggatatgttatactatgacaggaagtgcaactagctatgatgggtagaccatcatatttataaacctattgtatattagaattttaatgtcaatactagcataatctattttggtttaatatttttttcttagtaggaagctttaactgttttaaatactcagagtttggatttaagacagagttacatcaaatatggaattcttttggagatttttacacaggtatttgctaatctaaaatctaaatttttaataaattatacttcataatgagagaatttttaatgaaattagtgaaaaaaaattgaaacgtgaagagtttaagcaggaagttagaataaacagatacaagagaagcattgttaatgggatcacctatccctctcctcacctgtgctttcattgaaactgagaccagtcataattctgtcatctaggaaaatagacgaggaaaaattccacttatcttacacaatttttaaaatacataaatacgaaaagatttgagaaatgcattatgaaagtaggagttggtagacttttagaggggtttagagttcaattgtgtacttgtggtgttcacctgttgatgtaattgttggtatgctcaatttttccaaaccccaggatagacttgtttgtagaagctggcacaagtttgaagaaacacaaatgcaagcatttcttttgtgaagtctcgtagcacaagaggtggttggaaatagttttcttttcacccagatggaaaggactcccatttgatattttttctaaatggagaaagtgacctggttttagctcttgttcatttagctccttgtcatttggaagctcatatggattccaggaacagggcgaaatcatgatttctattatctgcactttctacttcctaatccccaaatcatgcctgatgctttcccctgtcatctctccatctgtctttcttttcttggaacagttttagacatcacttgagcccttcataatcacactctgatcagtatctatcatccagaaagacttcccaagtcttaccttgcatgtccaacgattggtatttatgacctgccagccctttaaaataaacatattgaaaggttaagttctcatactcaccctccagacttcacacatacctcacacttaactccagaggccagactgtcagtcagtcaacaggtattatgctcactctatcagaaatcccatgagtctatttagtgtgaaattaacacgtctgttttttttccttctagtattgaaattctgtctctcaataaacttctttcttacgtattttccattgatttttttaaatacgtggctcaccaacattagtctgaattattgtgttctgtttccaggacaaaaattgaaaccagcagcccttatgtcatcttcatccgcagtaaaacctctagtcccaattttggttttattcaaatgtgtaattctctcaaggcctatgtgaagtgctatatcctttgtggtgtattctctagccctagatgtgaaagccctgctctgtttgctcttcttcatggttgtcagagaaattctctccagtccagatgatatcataaagtttgtcccacccatattatcagatctaatcagaagcttgccatcatcaaagctaggaggctccacttttttttttttatcagtattacccccaattccatctttaggagctcattgccagtagcataattgttttaaggaatttggggacaatgctagttaattcaaacataaacagaagtgaactgaaatttttcttgatgacttctcagccacttatcagaacccttatgtgatcttggacatgaggtctccattttctcatatttcttctcttgtctattcccctgagtttcataatctctgtgaaatgccagagctaacttctctgctttatgctagctaaatatgtcataattcaagaaaaacgtattgcctgaacattccctgcctaaatctcataaaagaatttcatcttctagaatcaggtagatatttaaaggtttttccattatgcttgataatacatctttccctcagagctctgcagacttaaagtcgtttttggctaatgtggcagtttgaataaaaatggctcccataggccgacaatgagtggtaccattagaaggcgtcagcttgttggataaagatgaagtgtggtactgaggcttcagaagttcaagccaggcctagtggctcactgcctcttcatgctgcatatggatccagatgtacaattctcagctacctctgtggtgccatgtctgcctacctgctgcgacgcttcctgccatggcaacaatggacaaagcctctgaactgcaagtcagccccagttaaatgttttctttcatagagttgtggttagtgtctcttcacagcaataaaaccctaactagtacagctaattagcaaatgtacgccaatttacatagccataactttttaggcaaggcgaagttattactcatttgtttttccgtgtttcatcttttgtctgtctagcttgaaaacacgcttgaggagagggtatgtagcttcacacagtttgttaattccaatctgaaacatataaatgtttaaactattttaatctatcatatatgacttagggttgtttggcaagttgttttccttggagccttttttttttccctaacctaccagtaagtataataatatgacctcatccaaatgtgtaggcttcaaccatttctttaaagtcctttcctgatggcacacagtaggatgcctgctctcagtacaaatgtaaaatgtttgctgaatgcaaaatgattcctgcagtgaacgttttcaaacttagagatgagcatgtttttttttttatttttttttttattacaggatccccaaagctattcagtactatgattttcctttctcaatatcgctctgtttactctggaggcagttccacagagttctacccttaattgaggagacagaaaatcacgactttgaaacttagaagtacgaagagcaaaagacacattagctcagagacaaatcagtaattatggaagtaccttctcaatgttttcctctgccttagtgctagcaatcaaaactactgaattaatctgaagcagggtcaggactttaaatatgaagaaaatcgcttgaatttgaggcattatgtgtactgtacaagatgttctagcaacaaattctctgaatcctgtttaagagcaatgatgtagagaccagatgccctcctccagacctccagattaatatctggcagggctgcagatctctgatgcttatatagagaggcctcagaatttcttgaagagctaggctatgctccggggtggggagtgggaggtagggaatggagtgtagacattgtctgtgtgcttaggatttcccagtgcccttctggagtattctctggaggtttttcaattttaactaatttctttagctgaagtgtatttctaccatgtatgaatttttcaaaggccagtagattctatttgatacatccagtctttcctagattcccccaagatggaataaataaccatatattccaatatgctcccatcacataaaaatgtaagtactgacaacaatcttcatttgctgtaatggcagttgccaggcattgtactgcaaagttgaaatcagatggcagcttaccaactgtttgaccctgggcaagttatttaaccccattgaagtctcagttcttacacctatgaaatgagcttagcaatagtagcaacttcatgacttttcaaacattgaatgtgaggatccatatgaaattcttaaagggcacttgatacatggtaagctcttgcagccatctctcgtggaccactcttgccacacgaggcagaaagctgttcagtagcactgtccatagaacgcacagttctttattggtttaagcagtcatcgagacattatcagtgtgaaattagtagaatcttatgtaagtgtgtacattcggataacttctgtaaaaatcattcaggtagaaacatatgtggaaatagtcgtgagcataatttnnnnnnnnnnnnnnnnnnnncataatttaaaatttaacatgtatacgtatataaaagttctttatacaaatacattaaataaacgaaacggggatgataactattctgattggttctctttcctttacagagaactacagagatcaggaatgttttccagacactatctaacttgtaatttgaaaataaaataggaaagtttcattttagtgcagtctatcttacaggccttgcaagctgcaaagggaaacaggaggaaatattaagaatcaacaaaacattagaaatcgttcatgtgtgtcactgtccataccatggtgctccataaagaagggtttccctgccatgcccctagcctggagctggaggctatcagtggaattataaataagatgaaaccttgtttgggctcctgcttctgtgcagtatttctaagaacaattatttctttcgatgactctaaataaaatccctgctgccctttcagaattcagaggccagagagttctttccttgagcagtagggtacttgctctgctgtactgttggttttctggttttcaatgtaaatatgtttaggagagcttaggctccaggttaattatagtggttccagtattaattttctttctttaaaaaaatataatatatgtaatatttatatttatgtaaatataaatacatatacatttaagtatatattttataaatttacatttcaacagctgtccccttctcctggtcactctacccagagctcttcagcctatctcccatcccctttgcctctgagagggtattcttccatgcactcccacacagtcacttactcacccccaactttccctattttccttccgtggagcatcaagtctctagaggattaggtatatcttctcccactgaggccagacaaggtgttacctatgtgctgggggccacagaccagaccatttatgctctttggctagtgtcttagtctctgggagctctgagggacccgggtttgttgacactgttgtgctttctgtggggtcgccatccccttcagttcctttagtccttcccctaactctttcatgggagtccctgactttagactaatggttggctgtatgaatctgcatctgtctcagtcagctgctggtagagcctctctgaggacagggatgctaggctaggttcttgtctgcaagcacaacatagcatcagtaagagtgtcagggtttggtgcctgcccatagcattgatcccaaggtgggcaggtcactggatggcctttccttcagtctctgctctactttttttgtccctgtatttcttaggcaggaagaattctgggtcaaaattttgaaagtaggttattgaccccatccctccccaatgttagttttctaaggcgacattatcatgagtctccaacagcctgggtggcatgagcgaggacatttactccattgtagtactggaatccttaggccagaagtcagcatgctacaggactggttccatatgaagtctgatttaaagagattcctccctcagcttttggtgattctaggcatttcttaggtgacccttcatctctgtctccatcttttcttggcccttttctctgtttctttctgttttccttcttttttttttagttttttttttaaatattttttttattacgtattttcctcaattacatttccaatgctatcccaaaaatcccccataccctcccccacccacttccctacccatccattcccatttttttggccctggcgttcccctgtactggggcatataaagtttgcctgtccaatgggcctctctttccagtgatggccgactaggccatcttttgatacatatgcagctagagtcaaaagctccgggtactggttagttcataatgttgttccacctatagggttgcagatccctttagctccttgggtactttctctaactcctccattgggagccctgtgatccatccaatagctgactgtgagcatccacttctgtgtttgctaggccccggcatagtcccagaagagacagctctatctgggtcctttcagcaaaatcttgctaatgtatgcaatggtgtcagcatttggaagctgattatgggatggatccctggatatggcagtctctagatggtccatcctttcatcacatctccaaactttgtctctgtaactccttccacgggtgttttgttcccaattctaagaaggggcacagtatccacactttggtcttcattcttcttgagtttcatgcgtctagcaaattgtatcttatatcctgggtatcctaagttttgggctaatatccacttatcagtgagtacatattgtgtgagttcctttgtgattgtgttacctcactcaggatgatgcccttctttcttatcataagaacacttatccttggattcgaagatctcttatcttcaaatgtttaacctaagtgcatctggatggaagtgtcttctgtgggactaattttcaagccactacagactctttctgattactgttggctccattctgtctagagatgtaccatgcatacaaactgtgtgtttgaatgaatctgattacatgcctcaagctttcattgtgacttccaaacagacacagttaaggcttcctaactagttgttttttatggtaaaggaattcctaggaaagaggtgaacaaactttacatagctgttgtgttatgcaaggtaggcttggcttgggtagcaagtaaacctacagtcaagtctattggtaatctaccaagatgctatggtagagaaataatacccattatgatagctaaaatctatagagaatgcactttataaatgaatgcatccctacattattaatgacgggcttacgtgattccttaagacaacatattggagaagatggcactacagaggatacaatatctaacttcgtgggttctcagagatggagagcaagccaataaagaaaatgttgcagatataatatacttgaagtactcaaaaatttactaacattggcttatttgaaaagtaagtaaaaaaaggtatgtatgaggttgtacatcttgaaatgcagggcaactggcttttttatcgaagagaagtaaataaatagtttaaaaacaacgaagagtgaaggtagagtttttcaggaactgctaagaccaaagttataaattatctgaagataaaggagggttaagagaatgtctgcatacttcactttgttactctctactaataactaaacaagtatgaataacttatgaaaaaaagttttatcaggagattaatttttcctgcgagtacataaagtggctattcttattacaataggtcaagataattatatgatttttaaagggtgtctatctttttatgactcagaagagcatctttatttgaactctttccctggagttaaaagtgtcagtcacctgtcaatcaatttccttcaaactgtcctgcttgggggcgttatttcagaagtgagcaagatgtattcggtcttatccatacaaatggagctttaccaaaaaatcaaaatcttaagttttagaggacatttaaagttgtaaaagaaaaaaaaatgctgcacacagatagaaagatgaaggtagatgtaacaggcagtctcaagaggaacacacaagggatacagcctagtattaagcccatatctgttcattctttttgtagaacaagatagaaatccaacaggctctggaaggtgaggaataggtcacttccattacctgcttcctttagcccttcctgttgtttataagctgaatactcatgaaagtccctctctgtcctattatgtgtatttgaagaactacatgggataggttttgatatcaacctttttattttaatatcttctcatattatctacttaagtgtcttctggacaaacttatgagccaacctgtgatctatcccagctcaggaaatctagcaataagcatgcctttgctttattcaaaatcctaactccgagtcaccatcatatgcaccgcttacatcgtgtaacatagcaggtttgtaacccaattcaaatccactgaacattgttcagcctgagagtttactttcatcatcccatgcatgcaaacacaactaaatgtgatttaagggatcgtctcatagcacttacaattaaatccattaatcaggacagtttataggaatgtcacacgtgaaccgtaaacttcataaatattcaagcagcaagtgactagacagtcacatctcttagtaataaatgccttctcctcatggcatttattccattacaagaaaggcagagtttcttcctctggcagctcacgttcttgtttggaaactttcagtcgtgtttaccgatagaacttcttttactgtcctgtccctgtttccctgcattctctttgccatctccagatttctacaccgttgtgataattatcacctgcatttaagaatcagtgctcgatttcaaccaagtcagtctcttctgcagccaaaggaaataaaaacccagtcaagttcaagtcctgagatctcttgttatccatgtggacaaaacacttgatattttgtcagtgttctcttttctgtttggatatttttaaggaacaaaaagggctttattaaaaaatatatacatcaagattgctgcatagatgttttctttctatttaaaattatatgtgtgggtgttttcatctgcatgtgaatctatataccttgtgcatgcctggtagacagggaggcccaaatgggacctcatgaaaccagaaagcttctgtaaggccaaggacactgtcaataggacaaaaatgtcaacctacagattgggaaaagatcttccataaccctatatccaatagagggctaatgtccacaatatataaggaatccaggaaattaaccccaataaataaattaattaattaaataaataaaataaaataacccaatttaaaaatggagtacagagctaaacagagaactctcaacagaggaatctcgaatggctgagaagtacttaaagaaaggttctgttaaatattttaaagtaattttaattttgaaatattccattctagcatgtaaaaaaacatgataagacattctttaacagcttgttgattaaaaacaaacaaacaaaacaaaaacaacaacaaaaaaaacacagctggaatcttgaattcttttgagtttgtttccaggttgactctaagctgttgatcaatattgtcccagtacagtatttaagcagcaagtaggagttactttattcaagagcactgtcataccacatcttgtggctttatctgtgagggtgtttgagaaggctgttggatcactctgaaactgatctcataggctccccagaagcccaagctctgttgggggacggggggaggtgaggtacatgtgacatgtcctgagtgttatctcctaggctcgaagctagctcttagagacactatcagcaataggactaatgagccatggttttcctctaaaaatcaatgtcttagatctgaaagtgttgaccctacatctactgcatttccatttgcacacttttctcaaaactttaactaccgcatttcaatgttggactttatttaatgagtataaatatcatgattaatattatatgagtaatcctcatcccagcattttctttataaaatgcaagctaaagtgctgaaaaaaaatactcttttgctcaaattattttcaacactggacgtgttatctctttactaagcctgatagtggttatttttaaatcattagccctaacaaacaagccacaagaaatgtttgcatcagcagagatgttgcacaagatatattattattaatagttatttgttaaggaggttatgtgaccagcaccattcttattattacatgtacattaacatacttacactcatatcatcctatgaaataaatgtcttagctattatcatcttaaaggtgaatatactgaaacttagagaagctaaggaactcaatcagtagcttcagagttagaaatggttcctggatttacgtccaggtaatctggccataggatccgctctcataaataccgtttcatcacgaaggccaattttcaacttattctagatcttgtatattgccaattcaaagctaagtagaaaaaaaaagagaaaagagcaacaatgaaaagaaaataaaaacgctagtcagttcaactaaagattttccaaaaaatattttatctacaaacgcctgctacctcaacaaagcctatttctattcaaagaaaatcagcatagaagcacctcgctatttatctggcaatgtgcggtaatttgtaagtaaatactggagtttgtgatctaagtatagttacatgacatctgaattggaaagtgtcagaaaaaataattgaaattattattaacaaattaacttatttgtttcagaattagtagggggagatgggttatatagatgttgagtcagaataggtgctaaagatgattataggtttcatcttaatacaagagaaaaggcaataagaccaaagaacaatgcgttttccgaagtatcccaacgttcaaccatacgttgtcatcactagtacaatctataggttctagctgtggtctcagtacatacatgctttcatatttaaacaataaaagtgcgcatcatatcaattcagttattcttcccagaaaatacttaagagaatgttgttacaagctaccatgtagattaagacaatagatgcacaatacacctcctctagtattcaggtgataatctagcaagggagtgtctcccacatcactaaacagatgaatatacttcacactcgtgaattcaccgagcactgacctagacgtttgtcagcctatgacaagcactggtggaatgttcaatcaccctatgtgaatagaggtccccacgtgcacactaaatgttcactgtgtgtcagatgagaagagaaacacagacagcatttcttccccagtcagaaagttgcagggcacccagggcttgcttgtcacgtccgtgtttgcagacctagagtgcagtgcaaaggaactcactgggaaatgcaaatgaaaagcaagattttcatccctgccccagatatcaagggggtaccacagaatcccagacaacagcgaaagccatgcatcgctcttgtttcttgtcttgctacagtcctcttcagaaagtctctatctgtgcctgtaagtcgatgagcactctgcttcatcctcaggcagtttcaaggttttaggtttacatgggcgtccttgacccatctgaagctgagttttgtgcaaggtgaaggataatgatctctttttgtttttgtttttttctctgcctgttgatattcaaattttcagcaacgtttgttgaagattctgtcttttctcatatgtatacacacatgtgtatatgtacatgtgtgtgtatacatacatacacacatgtgtgtatatgcatgcacctctgtgtgtgtgtgtgtgtgtgtgtgtgtgtgtgtgtgtgtgtgtgtttggcatgtttgtaaaataccatgtgcctatagtcatgtgaacttatatccaggtcctctgttctattcgattaatatatttgtttttgtttgtttgtttgtttgtttgtgggagttggtttggtttggtttggtttggcatgtatgtttgtttgtttgttttgtgccagtaccatgctgtacctgttaccatggctctgtggtgtaattgaagataagtacgtggattctcccacattttgtttaagagtgatttgattacccttggtcttttatgcctcgaggtaaattttcaggattttttttctctaagatgtctgtaagaaatggctctggaagtgtgattaagacttcatcaaatacatagactgctatcagttcaaaagaaagaaaatagatagaaataaagtgaggacacatgaagttaacagaggaataggttagagaggagctgagctggggattgtgtcgtgaccaaaatatattgcatgcacatacatgaagttctcaaagaatgtattaaaaaatgtaagagacagtaacaaatgctgaagatgaaaagggactttatatactactgatgagaaaataaattaatccaactcttatgaatcgagaaaatttagatctaccatttgaaccgactgtcatacttctggtcaaggatgcaagggaaatgaaatcaaaggagatacctgcatgtctgtgtttattgcagcatagtctattgcgggaagcgatgtggccgcatgggccaagttgtttactgccttgcccgagcatgctcagtgaggctgcatgcatgggctgcctgccaggctggactgttcctcgtgatccggacctgtcagcctatccgtgaccccgacctgagcttgtgcctggagagtgtgtgaattctgattggatgaggtggggtggaactagatgaagtcagtcggccgagtataggaagttagttgtttagcccttgccctaagtagaagctagttgtagtaagagaagctgttgtaaggggagctgttgtaagaaaaaagctgcaagaaggagaacaagtaaagaagctgctgcgtgaacccaacttggtgtccctgttgttcgtgtctctccggctcgaaggacctgcagcagtctataataaagacctaaaatcagtatagatctagtaggtgaatggaccaagaaaatagagtgtatacatatacatactggaatatatgctaactacaaaaaataaaatcccttaatttgcaatagtctggaaaacataggaatttcgttaactgaagttaagattcagaaaaacagttacttcatattatctgaacttaatcagttgacctgaatgaagaataaataacaaatgctaaagatgggtaagatgtggaggcatggatagagggaggctggatttgcttagagcatgctgagtataccatgttaatacatatatatgtataaaaataaatattaaaagagtgagggaaatgtttaagtcttacttggtagaacaatgttggatataacttcaggcactgggaagttgacctggatttaaaaagtgctgtcgttaggtacctgaggaaggacattttgtagaaaagtacagatatagttaacccaattagtttgataatcaaggcctagcccatttaagggaagaataagtctcccagaaaattcatgcagattggactgtgcaaattttaattggtccctgtgaacaaccatagttggaagaaggaaggtaaatgtcagacacccccatttgagatagccttaatctacatgcatagctcagagctaagttgaaacactagattggcatgagcaatgagagctttcacaggtatagaggaagcagatggccagcatatcagccagctctggcaatagtttgctgaatgcaaccatatgtgaacaattagagagaaatattttcaattttagttcggccaatttttaggtgccatcattgtttttacataaatcaaccatgccctgccaaaaacctagtttgcttatgtttctgcatctacattctatacaagcgtgtactgagtcagtttctgatagcctcgtttgaatattttcacttcctcaaatatttaaatatttagtggctccaaaagcacatacgccatctcaaaagtttggagacttaaggagacaaagtgtgacttgttcaaggctttaaaatagctccagtttccctctgtatgtgacattggtagtgggggcaattgagctcactcatacatgtcaagcatgtatttaatctctttgcacctctgaaacaaatgaagggcatctgctttttggccagaggtccctaaatacattctcagttcacttttactggcttttctataggcatagactctccacagtatggtgttctagctatgccaagcccagtgaaagagggtgagaaaggacttgagcacaactgagcaaacattatacaaaaataaagcttgggagtgatgggctatcattttgctattttttttatttgttagaactaagctaacattcctgtctaacttcaaaatgagggaatgattcaaagccatgactaacaggaggcatggatcacctgatgcctgtctacagtgttccaagaaagaaaacctattccgaaaacctgttccggtcatagacataattttgagcttttctgtgaatcaaatttaaatcatcaattgttcaaatggtatttaactgttacataagtaagtgctttttaaaaaaaatgtaataaataaacaaatgtttaatactttaaccaggtatttctgaaatcaacttggctataaaggttttctatttctagattatattagaaaaattagtctttcaaatgattagatagcatatcaatatatatgcttctcatatggttctcatttggggaaatttttatatatattataaaacaatgatttttaaataaataaataatgttttatagataaacattgatattttaactaattattaagctttaaagattagctatgtttttttgaatttctaagtattcttttttttctaagtattcttaactatactggtttgcaatggtttttcataaaagacatgataatagtccattttgtattattttcttaaatatataatctttgtaattcatactttagttatgttagattgtattttaatctacaaccatctagttatattgacatagtgtgcttctagcttccaaattcatgctggcatcttcttccggaagtcttgactaagcaagcacctatattttaggatgtgaacttgagcacagatggactggtcatcccttatctgatgatttgaggctttcaatatttggtactagggaaggaggatgttaaaacaacataatgactgaacaaaaacattaaaagccagagtgctttaggtcacaagtttaggagccataggattggggctgcagccattggattagggctggatccaggccgtcaataccatagtatacaacactttcaggactttttgtggcttttaggtaacgagtcacccttcatttctcagacaagatgaggaatgacctgccatgagcaggatgcatcctttaatgtttttcccccaagtagctaaaggagtttgtagagccacataaaatcagtgtccacattcccactgaaagagctaaactgtaagtcagctcactggtggtggtgatggctcagctgagagactgaagcagaataagactacatagcacatatcaccctgtgacataagcaaccacatcaccgtactttgcctaagtgtgctgtccaggagctgttatcaatatagaattcaatctactcattgattcttctctatcctttgaccaccactacattctcagaggcagtccataacaaaaggcatcttgaagcaatccaatctgcaaccacacatttgaaaagctgctatatgcccagccataatgcactgactcctgaaaatatttactaaatgtcagtactatctggagctgtctgtagagaagcatttcaagcatagaattagaggtaatttgtagtgaagtagcaatatgaatgagaagttcttcaagcaggctttaagatgaatggaccctgaatcagcttgccatagcctgtttattaagtgcattgatttcacactaggaaaactcatattctacaatttacttttgcataagtgaagttagcaatcaaagtttgacctggcttgtatttgtgttccctgtacatgtcatggttctccttagctcttgtgctctcgctctctcactctctctctctcattctctctagctctctctctctctctctctctctctctcattaacttgactacataaagtaaaattcttctattattaagaaaacatttgcagaagcatcacagagtggctcattattgtgatccacttgcatacatagaaacctttactgtcattggatattgacaatttgtgggtttttaaaatttatttatttattttattttggggggttttttgatacagggtttctctgtgtagccctggctgtcctggaactcactttgcagaccaggctggcctcgaactcagggatccacctgcctctgccttccaagtgctgggattaaagacatgtgccaccactgccaggcaacaattcgttttgtaggcacaatattgttcatctacctgagctgctgtaaaacagcctttccagagggaggagctgctaattttttctttttctttttcctccatgaaatacaagggttcaaagaaatagtagaaggtctcttgtgggcagtactttgtgattggcaagtacttttatcttgggaatagcatacaatggagagcagaggtaaagaccaagataaacatggctataaagagccctggaaaggaggagattaaagacagagtaaaatctgtgcaagcatttcagacaaataaatatgtttcacatgtaaaccagtgagattttcaagagattatgtacaagagaactgctttcttctattggagtgataatgttctagatatttcatgtcaacataatgtgctataagagatgaacattgccatcagagggaattcccaatttgcaaatattcctactaagagtgattcacacaaaatgaaagcagaaaatcaatacagccctaacataatgcaaagtcgtggtccctagtgaggtaaaatgtctaagtagacagatattccattcatgttattttgaggaacataacaaggacactgccaagtatttacattggaaccaggaagtgatacaaatcaattttcttctttcccaatagtaaggcaacacactttccctttccaagatttgctgaaataaataagcagctgccataaactttattgacagtggtctgcaagatgcacatttaatagctgttgggttctcttaacagctagatacagtcatttacagataataaaatgtgagacatcccaatgttatgggccatatcatcccttggttttcaggatcatttcttctttatctcttcatctctccatccccttgcttcaaaagtgttctgcctgcatgaatgtgcatgcactgtgttgctacctggttcatacctgaccacaatgatcagcaaagggagttggaacctggaactggagtcatagatgtcagtaactcccatgtacatgctgggaactgaactcaggatccctgaagaacagtcagagttcatctgctgagccagctctcctgcttcagcatttgtgtatttaaaaatctaggtctgttttgtttccccagtgcaggtcttactaacgtgtatgtatttaaaaaaatgtctcgctttcccacatacataaaataatattgctgtcataagttttactatatgcagtacattgcagcacctgctatgtctgtatccacatggggccaaagttcagggtgtgggaattttctactaaaggatttaaaagattcagcatttcataaagagagaatgcaattcaactaaaccaccttgatcacagatcctggattttgagaaatgaaatatagtgctttaaatttcatctaaaaatttttatacaacaataagaaataatattcctctggacctgtgtagttgatggcatgattttcttttacatgaattagcttattatctggtcaatgaaaatggctaaggtgatctttgaggcttttgcccttacatcaatactgctgtctccatgattatacgcttgggtcatgtaggtcaatcagaatcaatatcaagttcagttaccaaccagtgtctgcccttgtaacccaacctgaagcagcccctgtcacccactagcacactccatgttttaatgctgtgaatatcatgcctcactctactctcttgggggtgtttgtttttatatttattatgtgttgttgttcattacggtgcattaaatacagaaagcagcatctgtggttgttctatttgctgctgcatccttagccactggaatagttcctagaagtttgttcctactcagtaattgtttattcaacaaatgaatgacataatctctgttacctttcccttttgtgttgatgattgaaatacagcatcagattaacaatgtataatacttccagcttcacatatgtcattagccaaatgtaaaattagctgacatgacctttataagccaaggtaattttaccatgcattttttgatattgtcatgttactctgcaaagaatgcgatcatcatcatatacttattaatttctccataacatgcacatcccaccactgagcccaggcttgtttttctacatcttgaaagaaagaaaacagtgatttcaaattcccgttgatgacttctttttctaggaaatgcttcagtcaaacaattcacatgagttatatgaaaatgtagaaaacaacttcactctttattcttattggtaaaacaagccatgcttcttcaacacaggaacttggacttctgctagataacagcttctcccatggagtttcatttctttccgctcttatcccctaccccttgaatcaatagaaggcacagatgcattccatataactaggaaaatcatctatgtgccattaaccaacacaagtttttgtattttaatttaaaataaggtcattgagaaagcctttcaggtaaaggtacttaccaccaaacctgacctgagttttatcattggctatggtggaggacgagtggagtcctgaaagctgttccctgtcttccacacatgtgtcatacacacacacacacacacacacacacacacacacacacacacaacacacacacacacacacacaatctagttgttgcagagatggtattttaacacaaacttttaataattcaaagttcccttcctatgcattttattatttggaagactattctatgaaacataaaaataaaaaaacgtgagatttataaagctttaaaataattataattatatatgaaaattacccactcaaatggaaacattagcttatggtttgggacatagaaactaagcaaatcactcatcatcatcatcatcacgtgttacttatacattaataaatgcagcacactaaaaattattttggattttataaattttctcttttcttttttttttattagatattttctttatttacatttcaaatgttatcacctttcctggtttccctccaaaaaccctctatcccttcctgcctccccttgttcaacaacccacccacttctgcttccctgtcctggcattcccctacacgggggattgagccctctcaggaccaagggcctcttctcccattgattccaactaggccatcctctgctacatatgcagctggagccatgagtctgtccatgtgtactctttgtttggtggtttagtccctgggagctctggggggtactggttggttcatatgttgttcctcctatggggttgcaagttccttcagctcctttggtcttttctctagctcctccattggggacctgtgttcagtccaatggttgactgagtgaatccacctctgtatttgtcaggcagtcgcagaccctctcaggagacagccatatcaagctcctgtaaacaagcacttgttggcatccacaatagtgtctgggtttagtgactatatatgggacggatttccaggtgagacagtctctggatggtctttccttcaatctctgcttcacattttgtctctgtatctcctcccataggaatttctcctacttctaagaaggtccgaagtatccatactttggtcttccttcagaccaaatgaagcgcactataaattagacctagtcaaaagatcattaaaattattaaatttgttaggtattggcaaatgtgctcttgggaaggagctgccttataaattaaggtatttaatatagtaaatattatactatggtaggcgaagatgaactcaaaactcgttctaacccttcaaggtagttgactgtcatttcctcagcagagtacagtgtgaaccttagacttggcccagaattctactgcattgtgaattctaacttgcaagctgggcatgaaatccacagatatttcatgcagaaaggagctatttgtaatagctaccaaagtgagaaagtgttccattaaggaacctggtacctacaatgacacgtgaaccttacaattcaaatttttagcaaaaaaaggaaaggaaagatgttggaaagcttagtgaagtgggccattttgtgaatgtgtgatgaggagtcaaatgggaagacagatgctgagaacttcaagttttattttcagtcaattttctgacaagctctaaacatgatgctaatatccccatcaatggcatctggtctgattcaggatcaattcgtcaatttagtcatgaatgtagttatacctccttcacaagtgacaacaagagaggtatagcctcataaaacaatgcaatgtgttttaaatcatatggtgaacaattaaaagtaaatcaacagcagggcgtggtggcgcataccttcaatcccagcactcgggaggcagaggcaggaggatttctgagttcgaggccagcctgatctacagagtgagttccaggacagccagggctatagagagaaaccctgtctcannnnnnnnnnnnnnnnnnnncattttgtgaatgtgtgatgaggagtcaaatgggaagacagatgctgagaacttcaagttttattttcagtcaattttctgacaagctctaaacatgatgctaatatccccatcaatggcatctggtctgattcaggatcaattcgtcaatttagtcatgaatgtagttatacctccttcacaagtgacaacaagagaggtatagcctcataaaacaatgcaatgtgttttaaatcatatggtgaacaattaaaagtaaatcaacagcagggcgtggtggcgcataccttcaatcccagcactcgggaggcagaggcaggaggatttctgagttcgaggccagcctgatctacagagtgagttccaggacagccagggctatacagagaaaccctgtctcaaaacaaacaaacaaacaaaaaaagtaaatcaacagtgccagccaaaaaaactcctccaaacaatggaagcagctaaatctgcaatcacttagttatcctgaaatggaagcagctaaatctgcaatcacttagttatcctgaagctttgtgttcattgtttacgggtatatcagaaacatagttgggcaacaacatgacatttttacccttgtgattgtcaataattaaaatgcagaaatgaggcatacatgcccacagtagtagaatgaacatggcaactaagcagcagcaaattatgatatatcatgtgactagtataaacaataaatcatatgagtttatggggagaaatcaaggaaggcatcacatccaagcttctatggtctttcctttggcgttgaatgggcggggtttgagagaatatgtatgtttctcattggagagtaagatggtgaagggcattcaaataggagttaagtgtctgaaacccaagagttcatttgtccttcttctgaaacagtgggagatcacaaaagtagctgctggccatattgtgtaggcccttgtttgctaagactttaagactttgttctttgaataataaggagtccttgaaggtttcctgcgtgtgagagctaggacaaagagagcatgttagagtgactaagctgataaaaatgtacataactttttagaaataaagagagatgagcaagcaaggaagcaggtagtcagaacagtggtccttcacttcaatgtgcttaagaattcacctagggaggttgttaaaattgtagattctggagccatactccagagatggtgactcagtgagtttgaagaggcccctaatctccatcttaactatgatcagtgtgattctgatttaagaggtcttcagaccacaatttgaataatactaaatttaaagactgtcacaataatctaggagtggagtggtcaaagtttgtaatataattttagactacagataaaaaaaaaaggaagcataagatctagacatgtttgagtacataaaatcaaagggaggaagtggtctagtacgaaatgaatgtgtctaattcaacatggtcaatgtgtttgcttatctaatttgacttgttcacttatatgtcaatgaatatatatattatgtctaagtgagaaatgaagaaattataatatgaactaatatacttgtaaatataaatacatatgaattaatatacatgtaaataaaaatagaaacccggtttcaaaatgcccccgtcatattcacagatcactgtggtgcttgcttagctttgcacatcatgggtttcatcttgaatcttcagtaaagatttttgggctgctttttatcattagcttttcaaactgtatgaaggttgctcagttataaaaagcatccctgtttaaccaagagggaaactctagggactgtactgaaacatactgaatctgggcaagaaataattcacatgagaaataatcagttctatttcctggcattctgactgtgttcatgatttggaatatatatatatatatatatatatatatatatatatatatatatatatatatagtcaaacatatcatcttgaatcttattttaggtaaaaaacttttaaggaaagaagatgtggggacttgctgtgaggatttagcttacattaataggtttaccaggaaagacataaatgaaaagtattaggaaaattaagtttcagtagaaattacaataattaacaagaagcatatctttcctggattgatgcaaatgttttttattgattttcatcaaagagtgatcaatagccaggaagaaattttcccaaaggcaatgcaatctcctaaaggtttcttttaattttttttatacttcataccattttaaaaacatatgtgaataattcagcttcctagttaataaactctgattatttttatagattatcttcatagttagtgatgggtagcattggctattgggagctagacgtgtttcttgcatgtgaatactgccaaaagttatggtgactacacaagtaccaacaatggaaggggaaatgccatgcagctcaagaatcatgaactaagagtttccgcaaagtttccatcctgttagagctaatcacgaccatagccttttatgtttgaaagggatgcttgcttcctgaatcaaacaagagaagtcaagtaggaaaagaaggggaatttggggaagcactccagtggagtagaacagggagccataaagaaacttggagagacaggcaatttgtgctgagcaaaggagtgtgcttcctgtaagaagacctaggtcaactagagctctagttcagaggttcgcatccccgtggggcctctctataactgacatcgaggatcttgaaattgtctactaatccagtcacactcagttttcacagaaacacaacaaggagaatttcatcatggagagaacgttataaatagtgatttggtggtgaaagaatttgctatctaattattttagtcatcagtgaagttgttttatagagataaatttaggaagtcttttagacttggcagactctacagtatgttgcaggtatgtgactctgcacattgccatgcaataaggcataagtaaaagagttgaattgtctaggtgccaatataaattttcatggctagaaaacactggaattagtttttgttctatgctgtgaacctaagttctatggttcacaaaatgatctatgataaccaaatatcaaacaggtcaaaaatcctagttttagtttgagtgaaattgttaggcatacatctagtcaaactaaaagaatagatggtaaaagataaattgatagatgatagataggtagatacatagatacatagatagatagatagatagatagatagacagacagacagacagacagacagacagacagacagacagacagatagatagatagatagatagatagatagatagatagatgcgtaaatatattgtataatggaatcatatatgggtgtgtgtaataggttctgtgccaagcattttgtatttattatttaatctttgcactaactttgcacagttacttctattatcatcctccttgatgaataaaacctgacaatctgggtaatgtaatccagtccagaagactttttaagtgccttggaacggtctctatatactactcattctctcaaaagtcataaaaatgtttttaattcattattttatttatttacatttcaaatgttgtccccattccaggtctcccttctatgaaccccccctatcccaaacccctctgccttttctccacccactcctgcctctagcatcctccttctctggggcatcgagcctccacagtaccagtgcttcccattctactgaagccagataaggcagaatgaaccaggagccatggatgttttgtaatgcacaaaaataacaattaatcacaatgtgccttgaattcacctatttgaataagtagatccatcacatgcagattacttgaccaatgataaggaagagctgagtgacctagcctagtctgtggcttgtaatttgtcagcaactctatatcttggtatcttcaagaagcaacttgcaaatacaaatctagatccacgtttagcatagtccacaaggcactctgaacaatttaatgtgttcaaatgggaatgtttctattatttatacatgaagaagcatgctgcattctatgcaatgagcaaagggacaaactactcaaccttaccaagaatcctactatgggtgtgacgtgcattttaaatggatgtactaagctattaggaacagtcattcaatggcttctttcttctccaaatactatgtcaaaactatatcgactcaaatatataaaaagtcttggggtggtgagaaggctcagtgaggaacgtcatttactgccaagcctgatgagcagagtttgacccttaggaagcacatgataaaaaggagagtgagtaccaattcccttaagttgccctctgattccaagtgtgtgttgtggcaagaagagcatacatatgtacacactaccaccaccaccacaaacaacaacaacatcaacaactatgaatgtaattacatttttaaaaatcctgactcatagtgtaatctctcagaagctaaagttagcacaggttagactctgtctgggttataaattatgtatgtgtatatatatatatatatatatatatatatatatatatatatatttccttccatgaagctatggttttctaatattctactcatcaaacacataaagatgtaacaattaaatagcaatgaataatacatttgctttttaaatgtattactttattaaaactgcagcatttacaaatgaggtaaattcctcccatgttagtttgtggttgtaccccagaactagtcctaattcactatatttctggaatatacacgtattcccaaaggactggacactgggatctcatttgagttattagttacttaagatcttaagaaagaacaatggtaccacacagaagaatgcatttgttatcatttgaggagaaccctttgatccaatgagaaatgggaatccatctttcaatgacaaaccgttgtagttacattaggaattaagttgccttggacaattgtctaaacatattcacagacttctgaaagactaatgcctttaaacttggaacaaaatctaagaactgattttattactgcaacatggcagggaatttccctttctgcaataattatggttccaagttagagtagctcaagtgcttgccaatcttctgtactttatgagatcatctgattcatggagaaggagagataaaagttatttcatatatatatttgtatgtgtatgtgtgtgtatacatatatatgtgtgtgtatatttatactcacatatgtatgcatatatatatgtatatatatatatacatacacatatatattaatatgacatctgaaagaaagacagcctgaatgtacaaagataatctcagtgatgacaataataccaaagtgttaatatatatatatatatatatatatatatatatatatatatatgattgccttatccaattttttataaaaatcatatcatatgtactttatcatgaatgtgactcagtaaatttacattttaaaaaaagacctgcaaaaaaacctcacaaacatttcagggttccaagttatttttctctggggcatattcccatcttttttttttttttttttttaaatcaactttttttttctttttttttaatttttcttttttttattaggtattttcctcatttacattttcaatgttatcccaaaggtcccccataccgaccccccccatcccctacccacccactccccctttttggccctggcattcccctgtactggggcatataaagtttgcaagtccaatgggcctctctttgcagtgatggtcgactaggccatcttttgatacatatgcagctaaagacaagagctcccgggtactggttagttcatatgttgttccacctatagggttgcagttcctatagctcttgggtaatttctctagctcctccataggggccgtgtgacccaccaatagctgactgtgatnnnnnnnnnnnnnnnnnnnnacgttataaatagtgatttggtggtgaaagaatttgctatctaattattttagtcatcagtgaagttgttttatagagataaatttaggaagtcttttagacttggcagactctacagtatgttgcaggtatgtgactctgcacattgccatgcaataaggcataagtaaaagagttgaattgtctaggtgccaatataaattttcatggctagaaaaccactggaattagtttttgttctatgctgtgaacctaagttctatggttcacaaaatgatctatgataaccaaatatcaaacaggtcaaaaatcctagttttagtttgagtgaaattgttaggcatacatctagtcaaactaaaagaatagatggtaaaagataaattgatagatgatagataggtagatacatagatacatagatagatagatagatagatagatagatagatagatagatagatagacagacagacagacagacagacagacagacagacagacagatagatagatagatagatagatgcgtaaatatattgtataatggaatcatatatgggtgtgtgtaataggttctgtgccaagcattttgtatttattatttaatctttgcactaactttgcacagttacttctattatcatcctccttgatgaataaaacctgacaatctgggtaatgtaatccagtccagaagactttttaagtgccttggaacggtctctatatactactcattctctcaaaagtcataaaaatgtttttaattcattattttatttatttacatttcaaatgttgtccccattccaggtctcccttctatgaaccccccctatcccaaacccctctgccttttctccacccactcctgcctctagcatcctccttctctggggcatcgagcctccacagtaccagtgcttcccattctactgaagccagataaggcagaatgaaccaggagccatggatgttttgtaatgcacaaaaataacaattaatcacaatgtgccttgaattcacctatttgaataagtagatccatcacatgcagattacttgaccaatgataaggaagagctgagtgacctagcctagtctgtggcttgtaatttgtcagcaactctatatcttggtatcttcaagaagcaacttgcaaatacaaatctagatccacgtttagcatagtccacaaggcactctgaacaatttaatgtgttcaaatgggaatgtttctattatttatacatgaagaagcatgctgcattctatgcaatgagcaaagggacaaactactcaaccttaccaagatcctactatgggtgtgacgtgcattttaaatggatgtactaagctattaggaacagtcattcaatggcttctttcttctccaaatactatgtcaaaactatatcgactcaaatatataaaaagtcttggggtggtgagaaggctcagtgaggaacggcatttactgccaagcctgatgagcagagtttgacccttaggaagcacatgataaaaaggagagtgagtaccaattcccttaagttgccctctgattccaagtgtgtgttgtggcaagaagagcatacatatgtacacactaccaccaccaccacaaacaacaacaacatcaacaactatgaatgtaattacatttttaaaaatcctgactcatagtgtaatctctnnnnnnnnnnnnnnnnnnnnggggttatttgattttctggagtccaccttcttgagttctttatatatattggatattagtcccctatccgatttgggataggtcccatcttttaaagtgactgtttcatttgtgaggattcatgctctgttaacagaggaccagtagagcagttcagtattgtgcatgttccatcctgagcctgattctcccttctctgcaaggtctactatttgcagagtaataatcaaataatcaaagtaatcaaaacatttctgattgtaagacagctctctcgggatatccagaggatgtaaggcgtagatacttagggatatacatcttctgggatcagaagactcacagaggaagatccgggcaggtccttgtgtttgggtcctacagagttccacaagatgtttgtgtttgttttgttttgttttgtttatcttaacttagtgttcatttaaagttacaatttgaaaggaacacagattctagtttttaaatcttatttatttgtttgtttgtttgtttgttttgtgcatcttcatgtttgtctgtacatcaggtacgtgccaaccaaggccctcaaattaggttgtgaacaattgtgagccactttgtgggtactaggaattaaacccaggtcctagggaagggtagccgctgctcctatcttgtgagccatatctccaatcctgacagagtttatttttaaatagcataattatttttttcctggagtcctctttgggtttctcacattcttttttttttttttatgctaccaccatctggaaagtttgcccattggtttaatttggcaaggtgacaaaatcggagaacataaatggcccacagctttctcttctagagatggagtattaaacgtcacctagcatcttctttcttcccactgcacacactgttgtctgttctgttagtgatgaggagggatttctgtcctgtggggattctcataggtactgctatttttattatatttatctagtatatgaaaacgtgcctataggatacagctgtactgtaggatacagctgtgcagcagatattcatgagctgcgatgctgtcagttcattgcccctacctgtaagttcctttcttctctcccacaccacctcttcagtctctacctgctggtagatcatttgaacttggtggactgtataatggttcaattattaaatactttcctaaagtttgcaagcatgcatactctctgaaacatcactgttggggtgtgatctacaaacctgtcacatctactttgcctggaaatgtctgcaatactgaccttcagcctctgctttcagagccactgacccctaattttagcttaagaaatgaagtgctgccaaaatgtagtattggctttatttgttattttattttcctcttcttcttgttcttcctcatcctcatccttcttccgcctcttcttcctctttatcatatttctttcttttctttcccctccttctccctcttcttcctccttctcctaattctcctcctcatcatcatgtttcttcttccttctcttcctccacctgctgtgtcagacaggttctccatacatagtcctgtcattcactacataatttaggcaacgttaaactcacagaagcctgccacttttgtttctgaagtgctgcagttacatgatatgttaacatatatggctgtatcctttccttcttgttttaagtttcataagaatggtactatgtcagcttttatctcttgctttattcattgaacaaagacaatcactaatatacccaggtttcatgatatgaaatctgtgttaatattttttttcttgctcaacatttagtttgctttccatattttgttatactactgatggcatacaactccgttgtttagtctgcatgtaagacaatttctatgccatgagccctggagtagaattgtagatcaacttgcatgtgaatgcttatatttggaatatagtagcaatgtattttctgctacctatgtataagaatcttcattgttctacatcttcacaaaatatgatactatctagctcttttgctaaagtttggacatgaaagtctccagtcactgtggcctttacttatgattgtggtgatgggattactaatgatatgaatctttttcttctgcttaatcaccatttttcactcttctgcagagtatctaaaaatatttcactgttttctcagtgttcagtgataaataggaatatttattttggaacagtccttgtcaaactacatgcagtgtgcaatatcatctcctggtttctcattcttgatcagtcttggtgaatgcaagtcctaaaggttaatagagtttactttaccaatatctaaatgtttatttctgtatcatgtagacaagaaaccctccagtgtgtggatatcataatagaccattaatactatcagtggatgagtgccctcatatggatttagaacataacaatattagctggaatgctacaccatccatccactgatagcattgaataacacgttcactgacattttgatttcaaaggtctatgtttaatttatcccatttgtcatcacaggttgggagtgcagcttggcaaggatcaagtttgggcaataacactatacagatatctgacattacataagtaactaccctagaaggtgcagtttcttgctatgtatggttacaacacttcagttctgaaacattcattaactgtagcatgtgtctcctttccataaatgctttttaaatttagaatcattattttcaatgtgaattttcttaagtgaataaagatagtcagacacactaccatattgatacctgtcctctgacttttcagcatctcaaattgccaagtgttcatgtctggctaaaattattaggcatctagatatttggacattggtggttggtcttgatttgatagcagcaacttcttttgtcccatttcttatacattgttgaaactaacatttcaaggaatactgattcttttgaaaattctcatcatcaagtaccagaagttaaaaatccttctttaaaaagtcagcatttaggaacatctgacagatgggcatttagcacctgagtaattatccttcaagtgtcatgagatactttaaatgttctgtaacatcttctgaagaatttgaaaacatcttctcattttaagtggatgccagatgtccaactgtccatcattttggaatcattttagcaataaaattatattcaacttcaaatacttgtattttgctacttcatagagtcgacttggtatatatatatatatatatatatatatacaaccttttccttattttaaaataatttattctttctgtatatgagttcactgtagctgtctgtcttcagacacaccagaagagggcatcagatcccattacagatggttatgagccactatgtggtctctgggaattgaactcaggacctctagaagagcagtaagtgctcttaactgctgagccatctctccaacccatccctttcctgtttattgcatgttaagtaagttttttcttcaatgaagcctataggatagtgttttataggataatattttctagctattttatgtgagtgttatgcatttacatttaaaatccaatattgtgtagctatagaaatgcaattaccaaatcagaagtcttgaacatgacaaaagtgcacctctttgataatattctagtttccaaacagcttactcctcaccccatcctaggccattggtgactagactattttctcaattcataacaagtttatcagtttctttgtggtttcttggccacagcctggaatgttgacttattcctaacatcggtcaggctcccactggtgataacaccccaccataacaaccttcctcaggaagtctatgaaaaagaatccactcaaacatcaggatccaatttcttaatttgtttcagttcacatcatggcacttaacatcatctgacatatttacgtatgagtttgaatgcccattctaaggattcccaatggaaaatgaaaggtagaaatcttctctgcttaactgccttctgcatccctagagctcagtgtctggcacatgataagcattcaacaaacattaccctaatgcgtgcacaagcattcagacaattaaatgaacaggttgtttttcaggtagagtcagggtcacactggctatatcaaatatccacagatgctagcatagttcttttagtctctactgaaagacatgctgacattcaaacattaaaatgtgaagaaaatagtattgctagcattacacaaaatagtgcatgaaaatatttggtagagtgccaaaatttaaatgttcagtgaatgtaatatacttgctagctctctctctctctctgtctctctctgtctctctctgtctctctctgtctctctctctctctctctctctctctctctctctctctctctctctctttgatgtcacaaaagaaatgctggtttcttctggtttagagcaatgcacttcatctcttatttagcttactttctctttgtaccatcttctcgcgaacaatacagtactgtttttcttcctactcaaatatcttcactgtccttctatactcaaacacctcatatcctaaccatagaccttaaatccaattcacccaaagatgctccttttgatgatgtggtacagttatcacattgccttggagagacacaatgaggtccttcttcccttggtacatgcaagcttgcccatctctgctcctcacagagccatgtaaagtcttagattttctgtatatccaatgaacccttatttctattctgcttttgcttatgctagtctttatatgtggtgtgcatgtcatgtgtgagtttatacatcataaaaacagcgtatttcaacatgttcttatagcattgacttcaatgatatttgctgttttaaaagattcacaatgccataataattggatatccttgtggtttagagttgagagcttgctcacaaaagcaacattgagaggtgaggatttgcggggaataggggtggggggaagttaaaccttaaatattttgacctaataaaataaataagtcattgacggatttacaatttgaagacattactgaactctgctagatactagaatataggtgctgattcaaggaagtggggccattggaggcatgtgtttgcatgatatacctcatacctgaccccttcttccttgttcttcttctcagataccccaaagtaggtagctctgctctgccacatagttcccactgtggtgtttgttctgtctgaccaaaagcttgactaaaacagaaccaaaccactgtgaaccaaaagtattgaaaccattaaccaaaataaattcttcttttctaaaattccctccctccccggtataggttggggagaggcaaccgaaaccgcctaccttattccttctattgtctatagcagatatattaatatataccactaaccaaggttggatagttattattttctctgtaagacacaaaaccctcataagcattatctcttggtgggcctttatgacttaaacaccaaagtatccatgggaattggcacttacagataagcaacagcttccctgaagattaatgccattagggtgttacaaaattggtttttggtgacattgaaccataaaccagggtgacgctcccacaatgatgtagatttaatatcatcgtaagcaaaaacacatatatttaaggcaaccattttagctcgtattaattgtaccaaatggaatagaaattttaatagtatttattctaatatatgtctccatgttttatactgttaagagcatttcctatatcgtgacaaaatatctgatgccagtttctactcaatagtgagaacctgggtaagatctgaaagtttctgcaaaaaattttgaatatttctaactagacaacagtttggtcttgtgtagcacagtatctggtggaagaaatttctaacgtcaaacggattgtcaccaaacttcagccccttaacaaataaaatatggaatatatacaaggtaaatgtctctttatatctttttcttgtcatcaaggtaggcattggcccttaaatcttgcagcatattgtttaattctgcattctgggcaggaaaaaaaatggtgctggcttcttgttagctgtaaattgacatctttctcctcctcagaattattgacaagaatgttctcccttgctaataacagcacattgagtgattgatgttgtcattagggaagaacttgaaatgtgtcagcactagaggtggtgatgtgtactctttaactcatggtcatgacaccaaatcaccactaagaccagtttgttcacgaaaataacactatccgtttacctgattttctattttttatacagatgtagattatggtcaataatgataatattcaaaaatgttccatgttaaccagttcacaaagactgccccagactgtgccctgtaaaattctaagacctgtgaccaatcaatcaataggggaaaaataacttatctgacagagccagaggaagccagtgagtcagcggaacgtcttacctgtttgttgcttcatacaggtagagcctccccacattagtgaaaagagtttttaaatggaagagagggatagctcaactttgaacagtacatggttttctttaacacagaagcaaacagagtaatcaataaaatatatttttttttctgagaactgagcattaagcttcttttaactgggaatgtttgagacttctgacaagagaaccaatagtacatggtatatttctgtagtcacacaatgaaggattggggtggatatgtagttactgatcaacagagatatccagagagcatcctcattttaagagtgttcagtcctccctttaagacagtcacttagtttgcaagcaagattcttggttcacaagcttgattctcaatcacattttactcgcaaacttagcaaaaatataaagccccaagtcttgtcctgctttaaggagcctatgcctatatattctgaattaacttcaagctgattatgacagtacaaagtttgtaaatcctgatctaggaatcgtctcccaaccttgaaaatctccatagttgatgttccctagacaaggcaaagttactaagtactgattaaaaaaaaaaaaaaaaaagaatgatacttaggattcttccatatctggaaagaaccatcaatatttctagcttttattaagcatttgtcttatttaactcattactgtaaatatagtctcatttaaaaataatcataagatactgaaaaataatgagtactattctgtacagaggagacagaagatttaggtagggctaagtagtagggaacaatccattaaaaaccaataatctgggctggagtgatggatcagtggttaagagtactagctggtcttccagaggtcctgggttcaattcccagaaactacatggtggctcacaaccatctgaaatgggacccaatgccctcttctggtgtgcctgcagacaacaacaatgcactctactcatatacactaaataagtcttttaaacaatcatctatgggaattatgtcaaactgaaaattctgcaaatagggaatatggcaaatggtttctgtgaacgtaaaagagttcctggactttaattttacgctatgaacaaatcaaagtcttttaaacacaacggaagttatagataaaagaaaatgttcctcggtcccatggaagtagccaactggcaatgagaagcaggtcagattggaatcattctgattaacctggagaaaaggatcataaaccgtttgaccgttaccatctgcaaaggtaggggttttaggtggagtcatggtactacagtttggggaaggaaatggatgggaaacacttccttgaaatggttcctgatgttaacaaggctaagaatggtaaggaataaaaacccaattatgctccagaacattttattattttctttctgttcacatttgggaagatactggctcaattctcctctaggaaatagaatatactttcatcattgtcacacttgtgtcttccaagggaggtgtgcttagtcatgtacagtttacattcttcatgggggaaacagtgcttcagagacatttgcctccttcctctcgggacctcctttctcagagtctgtgcatggtccaaatgtgagcaaaatgcccaaggctaaggactgaaggaaagggacatttccaatcatgagtagccattacagctgctccaggggtcttgtgtcctgtgtccagcattaaactattgccatttccagaagaagatgtttgtgtatttcatgggctgttcttacttgtgagcaaaggacatctaacttcactatcttctctactgccgtttacctcacagcagctctaccgagcagtcactgtgtagaggtggttgggttttcaacacgctgaagcttcctgattctaaatactctcgtacacattcaaccatgttatgactttctgcagggaacagaatgattaagctgccgatgagttactgtgagacctaagtatctgacaactaacgggtagtaccatggtgacttctgcagtgacaaatggtagaatgagtcgtcaggagctggcatatgatctttcagtgatacaacaatctcaaagaaagtacgtgaaatgtcctcacagtgctatgaaattaccttaacgtttaaaaaatttttgatattgaaggaaaaatgctaattctaggagatagaagttgcacacggactgtagcatcaaaggtgactgtttctgtgaaatgatggcaacagcaggtttttaaattctttggtaatagagctagggtctatgaaatgtggcaggaaagcaaaactgcagccaagctcggaagctagcagcccctaaagataaccagacatctgtgaccaggcttaagtttggtcagagagctcagctggactttcctaatcataagactgttcatcttgattcccagctacctctcctctccaggaccaaaacactagctggagtatgtccagaaggaaacagtgagcaattttccttctgtaggaaagattcacagaatatttaatcctatggcagagaaatagactaaattaatctaaaatattagatcttcgtgcagatccattttttgtagctacacacagacacaacgttccttgcaactttgacaggtagcatcccttttctttggaagcctgcatcctgcgactcattttcaacaagctctgagaaccagccagaaatcatcaaatccatttctgtgagaggagaggacttagtcaagcgtcgaagagcaaacctcggggcagtggggagcagagagggagggaggcgcgggcacagggaggggaaggatccagagagcaggtctgactcctgactggctggagtgcttttggagaaagtcagagctccagctggtcagtcgggagctgtccaacttttcagcagctctgagatccaggttcaggtgcccggactcaagagaaggctactgctgcgaagagaagagcagattctgtagagctagctgccaacagtccctaatctcagcggaggaacgaagagaaaagagaggggaaaaagaaaccgaccatcagagaagcctcgcctgccaatcttggttacttgggagcatccagcgcgcctttctgcctctgctacggagcagggatccctgtggcgatcgctcccgctaacagagccccctctcggtggccaggagcctctgaccgctacaagtcggaagctgagcccagcctctggcgcctcggcaagcggtggcagcaggagccgggaggcgctcaggctggtgtggtggacccggcggggcagcggggcacagagccggccaggatggaggcagagggcagcagcgtgccgacccgggcggtcagcgaagagggcaatgacagcgctggcggggccgctctcaaagcccctaagcatctctggaggcacgagcagcaccaccagtacccgctccggcagccccagttccgcctcttgcacccccatcaccacctgcccccgccgccgccaccctcgccccagccccagctgcagccaccgccaccgcccccactgccaccacccccgccaccacccggagctacccgtggtcgctacgcctcaagcggggccagccgcgtccggcaccgaggctactcggacaccgagcgctacctgtactgccgtgccatggaccgcacctcctacgcggtggagacaggtcaccggccgggcctgaagaaatctaggatgtcctggccctcgtctttccagggactcagacggtgagtagagagcgcccctcccccactcagggaaagggtcacctcccctcttctcccactctgtctgttaaccagtcaccaccaatcttggaatccagggtcaaattcaagaaactcagggagggtgagcaggggcgtgtctgtccttgccctagaagatataatgcaggtgtgtaatagacgtgaaagtaaagtataatcgttcagtggtgtgtgtgtgtgtatgtgtgtgtgtgtgtgtgtgtgtgtgtgtgtgtgtgtgtgtgtgatgtgttttaccggtttattggtttatttgagccatgcacctccctctccccgctcgtttccatcccaccccagcagtaagatgaaacctaattcagtttgtttctagtagagggagggagggtgaaggcgcgaaagctgggggtgggggaggctgcagtgcaaccttggaaaccacccataaatctgtccactcaccccagaaaggagggatcagccaggcagatctgaccagagagtgcacacacagggtgtggaagacagtttgctcgctgctcgctcgcagggttgcagcacatacagcctgagcacaactcttgtcaagtccagaaagtaaattgaacagcaaaggggagaacaaacacgtgggtgacttggagagtttggagcaaaatgttcagcaatccttaggagagagcgagaaggaggagggatggaagcgaggatgttgtgggagttactgtgtccgtgtgtgtccgtgtgtgtgtatgtatgtgtgcgtgcgtgcacgcgcgcatacaaccagaatgtgatggatcggtggtccctgaaccatcctcgaaagaaagcgcctcattttagtagcaagcaagagatagagatgtgattatagtgatttccccttaacataaagtgctccggaagacagggtagggaaactacatgtcagctcagagttttaatagatgctgcggaaagagtagtgtaaaggacaattacagtggttgagcaatcacctcattcttaactcaagggtggaggtgggttttggtcctatttggccctaaggccgtggatcccttcacacacacacacacacacacacacacacacacacacacacacaccagggagggaggagagagagagagagagagagagaggaagaggaagagggagagggagaggtgaattttacatacatgcacacacaagagtcacacaagggttctaggaatttctattcctttccacgtttgttggcaaagggaacagtcatctagtcttagatggggtggccattgatacctctacatcaagcccccacactggaccatgggtctttgtacaccagagctggttgtgtaaacagaaaaagatggggctgggattatttgtgtagctcttactgacaataggttggattaatagggaagtaataatgatttttttcaaccgtatgcttgtgtgaggctgtgcacttgtgaatatgtctccccatgtactgtattccctatgaaacaagaccatctagccaatcagcttcctaaccttcacttgccagcattctctcagctggcatatatcacttggctgttttccttccttgcttccttggataccttgttgatgacactgtatctgttggagtcaaaagatgagaaccatagctaatctcaatttagctcattttaaggttaatgatggatgttgattacagagcttaataaatcaatatgcaagcttcatctctgtagctcataatgttcaatcacacatgtagtttcattctttaattgaagaggtaaacatgctcccagtggctgagcatcaggccatatgggcccatgacagcagtgtagaggcaaggatattacttgacctattaatacaaaagatgcagtaatgagcccttaataaatatttaagaagaactttctagcttaatatgtaggttggttacttttgtaaaatctcctgattgactacatgattttaataaaatagatttgtttggggagagtggagctgagaaaaataagcaacgtgggatggaagcatcgcatcactgatttgagtttaattttagctattctctatacattgatggattgttatatcggaaattccttagttgaatggttcagataaatctaagatgtataacatttatatgttgttcctactgtggctcatatgatatattattgccattttacttagggattcatgactttaaattctttatatcacttgctgcatatttcacacacgttcacacactgaatgaattctttcttgaataaaactcattttgcaaatgaatgtgtttccaagaggtcatgggtattagtttcattatttagagaaagtgataacaatgctttcaaattattaaggaagtttcctgtctagaagacatggaagagtaggcttttccaacaatgctaacatcaacaacattatctccactttatagacgagaatactgggccctcaaggatgtatgtaatttatttggcatcacatagagtagacaggccagaattgagacagaaatgcaggtctcctgactcagctaaggccctgctgaaataaatgtgcgtggttcctggcaacagttgacagcatcaagaatatgtgaaactgtacatgaaatttatatctatgtatactacagggtatacatccagataaacaaaaggagagatatttacatcattcagaaaatgacaacatacacatttggaagcaatgaacgcttttaacttttattctcaacttgtcctgtccaaagtaacttgttgtccattatcttgcagggcaaactctgtattaattgacattcatatgaattagtgtttggagacattaagactgatgaaaacatttcagtttgttttcccttttcttctagaagagaaccaaacaaaaaagtgcacacacacacatacgcacacgcacaggcacaggcacaggcacgcgcatacgcgcgcgcgcgccacacacacacacacacacacacacacacacacacacacacactatgatctagatggggtttaaattatctgtgaagatgaatgcatgagaaaagcctcatgaatgtctggaagaatgattgcctatgggttatgaaaatgatatggctctgaaactctatctgtggcatggacagcagcatgtccagatgttattatctctgctgcagttttgagatttgcttataatatctacagcaatggcaaagatgtatttggttttaatgaagaaatttatatcaacaggaaagagatcggtctcagacattgatggtcaattcttttgatttcctggaaaatgagaatgtgtcaaatatatttttattaagatctatctaacaaggtagatttatttataaacatcaatataggagaaagttggaagagcaaaatttccaagtaagtgagtctgtgtgttatcatgagaacaaaatgaaatatgaaaacaatgttaaaacaccctttaaaataccagattttatcatttcaactaataagccttcaaattcacggcagccatttaccttaactgacaaaagctttttctttgacttctctttatagaaaaaaaaaaaacaactgttttcatcatcagcaatgtttatttccaatctttgaaatagctataaattcttagtaaagaatgaggcttggagatttaaacatgataggtgatttttttcgattctgtaaaaaaaaaaaatgttctaggtggcagagatgtaaatatcatgaaagtgatgtttgagttaggaacgtgagagaacatccaaagcctctcatcacactaaatataaacctaggtatgctggaatactgatgtggcattagctttgtaaacatttggagttttcatacaggaacggacattttgtatattgcaatatcttattaatattattaaaatcaacatgaggacgaggcacttgcatagaacatgcaaagccctggttagaaccataccacaaataaaatattaatcaaaactttactctcctcttcaggattaagagaagtattctccagtgtttttgattggtttcatcaaagactttcattgcagattttttttttcttcactgaagtgtgtaaacatactctaagtctgtggggccaatcttgcatttcatattatcaaaggaattgtttgagaatgttatttacactggatatatcgataaagtcaggtctggggattttatgaagaataacttatttttatattttttcttttaatattttatactcagtataaggttgacacattgaaattttaagtaaggacactaaatattaacttttggtatagcattggaaatgtaaatgagctaaatacctaataaaaaatggaaaaaaaagaaatacttagaaaaaaaacaaaacaaacaaaaaaacaatataagaaaagggtatttttttgtatttgtgtatgtttcctaaatattaataaacacttagaaagaaaagtaagttaaatatcttcccctgtttacttccactgaaagattatcttgttaggtttttaaaaatactttttgacagtgtattctgtcaaaatagaaacacatcctgagtctgtcaccttataatttggttctgaaactttgaacctttcatatttcattggaaattctggacaagaataggcaaggggggagtttaaaaagagagactagaaacaaagactcataaaaattgtcttgtgaaatacaatattggtgcattcttgcctttttcaaatttacttcagtagctctcttagaacagtgacaggagaaaaaggtaccattgcccgtaaacaaaccaacctccctgaacaccagccataatttacccttgaagaattctttcctgagaggtataattactctgctagtttattagcagatgtagatactcaatttacactttccatatctcctgacaactaattcacattttccatattgtggccatctgttttgctctgttttgtttcatgatgacacagggtttcgtgcagtctgggcttgctttgaactcattatgtatctgaaactgtcttgaactcctgatcgacatgcctgctgagatgacaggcataggtcaccgtgcctggcttagtggccctctgacagccaatgttctcaccttctaagtaataacctaaaactaaaataattttaattaccataaaattaccatatcatatacttgtgagtaaatggagaattcagatattggtaaaaggtaacttcagaaaccattttttttcattttcctttgtgaatagtttcttacactttaacctaccccacacagagtgatggattgctcactagtttaatgtgtatttagagaggcatcttgaaaaagttccttaaacattacatgaattaattatatgaaaaattaataccttttaaattattcaaatgtcttgagtctaatatggttaaaagtacatccattttatggcctattacccattcaggtttaaaaatatatagtatgcatatgcatcaatagcttaaaacctatagtccctgcttgtatcagcaacattgctaagggattattctaaatagcactatattatatttcaaaggctgctgtggttatttttactccaaagtacattttctacatttaaaaatagaaattctaatttttttcccagagaaggggggcagtttgcattacatttttaaaaagctcattgactaagtttatatgactccatacacacacatttgccatgagtgtcctcagacaacattagagatggaagaggttaacagacactccaggttttgtttgagacatgagtacacatttgtagttattgatctactcagtgtgatgtcatcatttatctcactgtcttaagccagggagctttcctgggctcttctcccataactctggatgtcagagaccactgaggtctttcttccaacctgacttctgaagtgccacatcgtccctttggcacttcccacagtgaagcacttaccactttcaaacatttgcagtaggctgtaagttatctccagctccggtatccactaacttcagtttatcttatgtgccagatatcaatcatatctccttgtatgaaatcttagaccaattccttttagcctgtgagatagaatctaagtctcttggtctggcacattgggatgttaaccctgcctatcttacatacagaaaatcttcttgctcacccccaacccatcccatcaaacactcaaattcttgtctccatgtaaaagtcttgtctctaataccacctttttccccgtgaaaaatgttctttatttctagatttccttccctatgtcctgtaccactccattctcatctcttttaaagaattaaagaatgtctatttgggacactaaaaggtattgggcatgagtgagagaaatagtcttccccagggaaggaaggacacagcaattggctgtccaataccaaatgctcagccctgaaaacatgtgcatataagtaatgtcatatgaactaatcaggttgcattttcattttatgaatatatatgtatacccaaatatacacatatatatgcttatacacatatgtgtgtctctatatatacatatatatatacacatgtgcagctttacatatatatttaatgcatatatgaaaaaatatatatataaacaataattaaagaaaaagagaccatgaaattgaaaatgagacatggggatacatgggaagggttgaaaagtggaaagggaagagagaaattagctaactatattataacatcaaaacctgaaaaattataacaacaaaaacaatatctgtttgaattcatatttactacccttggggacctttctacaaaagagagtataatattcttttgtatattatacttcagagtttctaactataacttaattattggttatattgtgtcttcctttaggtattttacaacttcgcataaagtatggcttccatgggtgctcaataaatgataagattttagtgtagaagtaataatgaaaccttacctttttggtttaagctctcccagacagggtatatttgatccccttaataatatctacgaagcacacaaagccagtgatattttgctcatttcagaggttatgaaaggaatattgtctctcagaaagatagatgcatatccattttcaaatacaggattcagacacaagctttaaaagccttaggctgatgataccttcattatagtgaaatatcttcttgtaccagttgtatgattctacttaaaatatgaaggcagaggggagttacagtggttatgaagggagacagtacttctcgtctacctcatgagaaatttataccagaatgaaaatgacgctgaaaaaaaatccctcccctttaatttagacagaaatgtatattagaatacaaataactctgaaagaatacttcccctttaatttcaacagatgcctgtggtgtacatccttctgtatctgaggtttcagataatccactgtattgggatacagcagagttcaggaacatggtcattatgtttgcaatatttttgtcctggatacacaaaagtttagacactgtaatttaaagctaactaagtggttggcttaattcactgagagaattattgtgagaacgtcatatatatctgagtgatggcttgcgttaggttgatgaagttaagcagtatgatatgtacatgtacatgttttataaatgagagagagagagagagagagagagagagagagagagagagagagagagagagagagagagaatttcatagaaggcttagaggtctttaaaaccaatatatcttccctcaatagaattttatggatttcacttgaaatgtatatataagagtagtaaagaacatactggaaaaaaaaaacatgtttttcaccaatgacatttcagaacaaatcatactggctagtgttctaggtggtgtagtattaattgtatgaattggtagaatttaaagaagtgaagaaagagacctatgtatatataaaatgtagaaaccagtcagggcagtgtcccaacacagcgtacatacactaagtttgtgcatggtgttcactggcttattcagataaagagtttacctcacagcacaaaccttaatacttaaaatctgtcaatcataaaattataaaaatcaagagaatgagcaaaagacatcagaggtaattttcaaaggaagattactgatgaatatatattcaaattttaaatctagctagctatagaataaaactgaaaatatacnnnnnnnnnnnnnnnnnnnnaactgcaaaatatacatatgtgatttttcatttataatttttcaagtaataggaagatgaatagtttaagagaactgtagatataggaaagtaactggtttttttatggatagttttggtgtagggtataaattagggaaatgataatgagtaatgaagcaacaggtaggcagtgtcttgtgtacatgcctttgccaaagtaattctgtgcacaagaattgggcttatgaatataatttaatacatagcaaaggaagtattatatcagaacactacactaaacatgatagcaaatgtcagaaaattatccaactatctttcaataaagcattaaaataaaaacgatgtcatacctgcaacaaaagaccactacaaataaaaactgaggaagatcttattatgcattagggcaaagttaagttcaatgtgtttttatgtgggtggatataaagaatagatcacagagtacgctccaagttaattttctgcatttattcatatttatattttcatgtctctgtgtacatgagtatgtgcacatctctccctgtctgtaacctctataggagcaaacctccaccaattgtttcaggtatattaaagaagaggtagtcagcaagtcttgcatttatgctttatgttcttttctttactttggttctatttttcttttaaaaatcagcacactgcttttccaatatacataaatgatcttttctttccctttgcattttctacctatttcagtcaatatattttgtttacatccctctttctccctcactcctaaaactgaaaattgttgcattgtcaaataatttagaacaagatacaaaaataaaaaaatatatatcctaaaacagaaaataacatcataaagatcgtgtgcaacatgaaagcaaactcaccacgccattgattattgagtaattgccaaggaaaattcagagatttggctgtgtgctttctaacagtgaattcaaggaagaaaacatcagtttacgatgcatgtgtgcagtaagttaacaaatgcgttgatttaggaatacatttttgctgaacactgagaattcaaagaaattccctgtggtgtcttccaagaagaacacaatgtgatatggtactcacaattttatcagcttctctatactctattaggtatgaattatgtgtgaatgttgctcataactgcaactgtgtttttatgaaactatgtattgatatcctgttgttgaagacattcaaagtctaccactatcagagtcctggttgacattcttttacttacttacttatttatttatttttatggtttgaaaatttcatgtgcatatgatatgttttgctcaaatcctcctcccatgccctcctttccaattccctacctatctctcaccatttcccctcttcatcatgtgctcttttcttaaatgaaggttctacatattcttttctattggcattctcccagttcttcctctttagctctgaatgtgctctttgttataataaagggggatgccttgggggctgagagaaccactcaatcatgaggacctgagtgcaattcctacgacccagtaaagaaaccagacaacctagaactgttgcaattctagaactggcaaacagagattggaagaccctgggggttcaaagggcaccaggctaaacaaattgagggggctcaggcagttgagagaccttgtctaaaacacaggcagttgagagaccttgtctaaacaaggaagaacaacagctaaccagctaacattagtctcagtctttaatatgccaacatatgattacacatgtatgcatatatgcacacacacacacatacactgagaacaagagatacttttgtagcttgggattcttctagactcttatctcctagagccaccattcagtcttcagttctcagatacctgaattgaattacatgccttttgtttttaggattaaatactgtttgtttctatggctccctcaaccactacttgttgacccaatttatctctgtaactgcagcctccagccatatctaacctggctgactcaatcttggtcttgaattaaggtccatcaacctaaactcagtcccttttcattgctggtaggaaatagagccaaagccttggtaagcaggtctcggattttctgacacaataagaccatctcataccccaaatatttatagggctgtttattctttttcccttactatacactgaatggtccaaataagctaattacaaaaatcaaccccagtataaaatatgggtctaggccaattaaaagttgggagttattatcacaaagaggttgttattttagagtcatttgcttatgactattctctctgaacacagaggacaccttttgtttattgtgtttgtgccaagttcatgataacaatattacactgtttccctgctcttgttatttacctcacaggcagatgtgttttcagcttacttggaagcgattttaaacccttcaaatatgatgatggtgttatctccatatactttctcattctcatcactacttggaatcatgttcagcatcccaggctttctgctgtattgaggaccaggatctcacccaggggatgtctaccactctaattatgtaggttctcatcatggaagcttcactgggccagctgaagaaagatcttcaaacaataagaagcagagttttgttttggttttaaccagatttttgaaaaattagtaaacaatataataatgatcaaggagaacataattgtaagaaacaaatacttacattcacaactcatggatggacacaaacactaggtaaatttaccaatgtcaataggtctttgttataagaaagaatataaccatggttttactggagtgggcctcttttcatgtcaaccagagcatcttcctgacaaaaatcagtatgtgttttgcttcacttaagatgttctggaaaactttccatccttcaactttgataatatattcatacctcacatcttacaacaaacaacacacgttgagcaaagttttctcagatctctcaagcctgtcataatactgtggccttctcctttatagaatttggaatatgttaactgtatgcttaactttgtttatctgcttaatgccagtacattttaaacaaacaactagccccatataaaagcaattatcaattccgtttccatataagcatagtactgtcatgtcacttgcactacaagaattattaaataaataaaacttaagagtttgtaagattgcctgctgtataaaagttgcaagctattacgttaaagagaaataattccaaattcaggcaatttttcttatgaggtttttgtaaagagtaacagacttaaagcctattttatgtaaaaggcattgagggttagcaggggcaagttattatctgataatggaatatcacttctggaaagcaacctggaaaacaagaagtgagtgaagcaatagcattgtagagtatcccctattgtccaggttagaaggaaggatggaaatgagatgctaacattatgctgctttatttacacagtgatttaacccagtgctgaccatttaaccattattcgtaaattaaaattattttatctcagattctttgcttctgtccgtctggctcatacaaatgcaacttgactataattactcagaaccttactacctgacagttccttgagatgtgaagagcttgtaaaagtgaattccctgctcataacacaagaacctatcaaattatccaagaactctcatggtggatggataaagaacgtgcctgcttcagtattctgacaaactagtgctcctagcttcaaaaggtttttcttggagacagtgtattgcttttatttttgtatagttaaacaagcaatctgttgaacaggttatcactctgttggcatagagaaatctgtagggcaaagtaacaactatgtattgaaaaataatgaaagacaggttttaggacattctgaaatcacagtataatactttatgcagaaagtaatgtaataaagaagaacaattttgtgttatatttcaggggagatatggcaatggcatgcctaactcgcctgcatcaccacttgctttatgatgccatgctactcggggttcagtgagttcaaacatcatgatgacaaagctcattgactagacaggaaaacaaaggaaagtaatatgcattctttcacatgacgaaaatctatctcctttgctagccttaaactataagcgcatgagcaactggcatgtagaacaaacaaggtcaaggtgagacattttaaataagtcatctgttgaagctggattgtgagtttgacaatatcagtccagaaactctttggagtatctgtaacttgtgagaagttttgaaaatgaaccagtaaaggagcaactgaggacacaccatctgtagaagatcaaaatcacatagcggccttcacacagtctgacagcctgtctattgcttcggatactcgctttgatgtgaaagtgaatgtagttaatgaatagtttggatcttcttgctatgatttaaaagaaagcctacctataaaaatgaattaaaagaaactacaaattacagaagaccaagctaaaatacaaaaattttctatctaaatgcctataagcatttggttcatagtggggcatggctgaccattgactgtgattaaaccagagatactagaaagtaaatggctaaaggatatagggctgtagtatcaaatggtgttccaatgtagttctcaaagagtattaaagatgtcctgtatagaactggccagaaacaactgcttccttgactttctccaagatgtcatggaagcattgagattttaattaggaaagttaacagttgtgtagcttattttgagatttaaacctcatttgacagatacatggaacatcaaatgggaagaaattggaggtgtcatttagatatttattgcagcaaatgaggtaagattcaaaataagtgccagtaacaagtgatgaactgaacaattctcagaaaaagtacccaaagggccaataagtaattatttcaaagtgttcaacatttttacccatcagagaaatgcaaattaaatctactttgagattctgtctctgtcagaataaccatcatttaaaaaagagacaacaaacaaatgaaaagaaaggaaagaagcaacacatgccagagaagtggcaactgttgcatactgtagcacgagtggaaactggtgcagccacattggagatcagtctagttatttctcaaaagaaagtaaaaataggactaccatatgattcaaaataccacttctgagcatatgcccaaaggaatctatatcctaccgcagacctattagcatattcatgtgtattgctactcttcaagatagaaaggaaatccctagaagtctatcagtggaagactggagatacatacatatatactacatacatacatacatacatacataatacatacatacataatacatacatacatacatacatacataatacatactacaacatacatacatacatatatactacatacatgcatactacaacatacatacatatatactacatacatacatacatacatacatacatacatacatacatactacatacatacatacatagggagtattcagccatagataaaaaggaaatatctaggaaaagcagtggatcctaagagtattaagtatttctgagactcagaaagacagatgctacacattctcaccaatgtgttgattcaagcttcatgtgtcttaatggggcaacatggacatggaccataaacctataaagaagccacaagagagaagagtcttagcaaaagaggttggggaaggtaaaagaagacaagtgatatgaaaatataaagaggcatgagggggactggaaagttcaagcagagaagaggacagggagatatgttagtggaagatcagacaaaacaaagcatattaaaatgcgataaagaaacctgctatcttttctcctttttaatttattcttctctcatatgttacattccaactgcaattttctctctgtcccctcccccccattctctctccctaccttccctttcccgccccaacccccagatccatccctgcctctatctcccctcagaaaagagcatgtcttctagggacaccaaatgtgacataacaagatccaaaaaataaggcacatgtattctcacatcaaggttcgatgagggaacccagtatgacaaaagagtcagagataacccctgtccccactgttaatagtctcacatgaacactgagctacacaaccataacatatatacaaaggacctgggtcagacttacacaggcaccctcatctctctgagcccacttgagacctggttaattgattatgtaggctgtgtccttggcccctgtctcctccaatcctttggtcccctcctccacagggttccttgagctctacctcatatttggctgtgggactctacatctgctcccatcagttatcaggtgaaatctctttgttcactttgttgacaatcacgttaggttccagtcccagcatatcctgcagacatggaaaactgtaggttgaaggtttcgtggctgggttggtatcccaatcctcctcttgaggttttgtctggttacagaagatggccagttccagctctgtgtctcccattacttggggtctttgctagtgttgcactcatagattcattccatggagtttccattgtgctaacttttcaccttgcccccgttacggctctctaattctagtcatctctttcattattctctccctttatccccatcacttgatccctgctgatgctgtctgtacctgtgcccagttcacccacaaaatctattctattactccttcccagggagatccttgtacccctccccccttaagccttcctggttacttagcctctcaaagaccatggattgtagcatgattatacattactttgcagataaagtaaagcatgtagaagtgagtacataccatatttgtctttctgggtctgggttaccttattcagggtgattttttttttgtagtttcatccatttggctgcaaatttcaggagatcattttttaaacagctgagtaatacttcattgggtaaatgtaccaccttttaaaaaatcattcttcagttaagagacatctagattgtttctagtttctgtctattatgaataaagctcttatgaacatagttgagcaaatgtccttgtggtagaagggagcatcctttgggtatatgccaggagtggtatgaccgggtctgaggtaaatagattacaagctttctgagaaactgccatattgattcccaaaagtttttacacaagtgtgcactcccatcagcaatggaggagtgttcttcttgctctatctacatcctcaccagcatgagctgtcacctgtggttttgatcttagccattctgacaggtgtaagatgagatctcaagagtttgttttaatttgcatttccctggtggctaaagatgttgaacactttttaaagtgggaaatctgttacttttatgctaattttaaagtgaaataaatgatgctaatctggagctaataatgtagaaggaatgatggcaaagaagatatgactttgaaattttctaagcagaaatgtttgttggctgatgatttaaaaatgtcaacccaaataacctattaagtgtagtcaaaaaaaatgattaaggaatccataagtatctgaacacctaagaaaaacatacaatattaattatcttttgacttctcagaggtcatcctaattgcttgtttgctttagtgggatcaagtctgaaaaattaatcaaggcaaggaattatttgacttcaattaaaattttcagggtcatttttgtacataggaaattatgtcattgaactaagtagaacaaatgcccttttattgtgatgtctgtgcatgtatgtgtgtgtgaactgctaaagattaatgcatttctctaaactggttttctgaactagttgaaaatgatgaatatcatgtcaaactattgaaactacttgggagggggggaagtctattactttctatccctaatcctagactttctagcttttgtcttctaatcgcctatttctatactcatcaattccaggaaatccagacactggcatatgtctacatactgttgaatccttgcctaaatttttttctctcctgtccatcagttgcattttgttttgggtatctacctccagataatttctaactggaccactaacctttgcgtttgttataccatgtctgtgatacctaccaagcacttacaccaacaacaacattcactcatgcaaagcatcctcccctcttctttgttgttttagttctgaacagccatattctccaggatggctattctcatgaaccattcctataagtacttcctataagtacttcctacactatactataagtacttcctataagtacttcctatactatactatactatactatactataagtacttccttaagttttcattttcttggtaattaaaaaactccattagtatatcaagttttaaatacactgaaaacaaggaggtggccagcaaatctgatttttttcatgtatattttcatattttttggttatatgcttatagtctgactatatattttcctcatagcactattagttcatagaacagtcacaaagaatatatacatttattttcttctttgttatcctcctttctggtcaacgtgttagtattagaatacttagcaattttccatgtcaaagataaaagacttttacatcattttttttttaatattagtggcgtctgtttatcactcagtatttaaaagatattgtcagagagtcttagaatacactatcctaaaggaacttcctttaaaaggggtttaagttaaagaaaaccatgttagttgtattaaaaaagagaatgtctcttggttgcataaagaaagagtaggagtagttaatgtctgtagatggagcatctagttgaaatactggaaaagcaatccaggagaaggagtgaatgatagatacaagcagactacaccatcaaaagcatggctgatatcagcaggaaaggtcagttaacccatcacagtcagtcagaaagaggtagattggtgagccaagagcaagggtattttcaggtatatactgggtaatatagctgaccagatcagctgaagaaagttggtgaatttgcatatgaacattcaaatagagatgtcaggcagataattgtcaacagcattatccctgtcattgtcatcatcatgaacaccactttttgagcatcatcatttgttgactaacaggtctgctcgtcaagaagagagatcacattgtacttgattctcttagcaatcaagcaagcaagcactcaatacccaattaaagaaactgatggcatataggacttaaagatttgcttataggtcaaagccagagaccttctaagtcgagagctctgactctttcattttgtcagatatcaggactcagaagaagagaagagtggtataaatgagtttgaaaatcataggaatataataggtatcactaagaatttccaaagaatctttgtccatggaaagggagcttaagggtggaagccaggggacaacattcagagtacaagagagaaaagggaagccagtgatagatcctaaagaactttcaaatactttgttttacaaggttgggtgcagagaactcacacaaatccttctttgtattcaatggaaattaatctgaacaatgggaaaaaagcgaaactgtaagaaaataaagctttctactatgatgaggctctatagatgttttctcgagtgtacaggttgcccctttcaacagtgatatacaggaaatgaaacatactaagtaccaggagccttcctatgctgtcctttcaaaacctgcttactataagacaggacttcgaacatgttacccccacagagttgtcccttgttgaattttattaatcataactaaaaattaaacgtgaggttaaagacccttactttccaaaacaacgctatatttgctttacctttaacttatgtttgatcaaggtgggagaattcaataaagggacgtagattataataatagcagtgaggaaaatagctctatcctggtataaacattttgtttgcacatgaacaaggtgtgatgttacttgctatttctccatctaaaatcactttggagtctccaaataatcttatattttttaatgattaagaagtcaaaaccagtagagcgagaaataaaactatttcctttcacaaatatcatcacaccaggatgactctgtctttctagtcttacagagtgtctctaccgcaaggacactttttgttttggcaattgatattcccttctggtgcatattagaattttccaatgtttatactccagttttttattcataacatgcaaagccaattcatgtgatgaaattttccatcccatggtgggaatagatctgatgtgatgttaccttaagatgcttcaagacagtgttaagactgaaacaagtatttcatgggaatcactaaaagtctttatttctaattgttgttgctactaaaatattgtatcagaccattttgatttcttatttccacaaatgtttttacttgtctaggaacattgtgttagcttgcacatactggcataagacattagtttccaaaaacacaaagttcaaatgcacgataaatactgtgacttcttttctatcatcaatcatttctctgcctctaaacagcaacatgtatatgtttatatataatgtgtgtaatatatatatatattgcacatatacatatatatgtgcaatattatagaaacactttaaatgaattctctcctcttcatttgttcaatgcaatgttgacctatctttatggaagttttgaaatatcaccaattttatatggtcttgtctcatgcaatctcatatacttttaagccttagagcagaaaaccttttatattttttccttccagacttttggctcaatcagacttctgcatggctggcgtggcaaatcccactcccgtatctggtgagctgtgcagttagcagccttagctcagattccccactgctcagctgtcaacagccccacatgcaagtgtagccttaaaacaagcgatggcatagcacataatcaccagattgcttcaagatctgcccagtcatccccctcgctgtgttagcctttagaaatctgtgtcatctgggtatatcacatgaaaagaattttcccttgatctctgcttaagttcttggaatttttccctttaaatcacagggaattagaattggacactatgttttggatggcagcagcatgtatgtttctcctttaagtctctcaaggagtatacattctgtgtgaatgggaaagaagaagaagaacacaggattagcaatttagctccagaaatgtccctttagcatctcatctgcagattggctgcttagacatggctactttgtgcacaggactgtctggagatgggagatagtctcaaataccattttagggttgagttttacatgtagaagtgacatataaaaaggctttcccttttcagggtagagatggagactgttattctgtgtcatttcacacttgaaagcaggggtttctttgctcatctgtttttgttttgtttggtctgtgggttgttgattttgagactcttggcatagtcctcactgtgtatctgaggctgcccttgaaactgactgatcctcctgacctaacctccctggtacaggagttgtaagtgtgagcatcatgcctggcatgtctccagtgatctgtgttactcactaaacaaatgtgaagatattccttgttgacagccaactctattttgctctaatcttattcactaccattgtttctgtacagagttgtgtgcattccctgaaattaagcttgcacagcaggctttaattcagtattcttgaatagttaatactgtttcacatttcagcgtttagaaaatggagaaagagccaggattaagggtcatcaaaccagaccctttcagcaatttatactattttatcttccaaattctgcttgcccgaaatcactgtttttaaatcatcaaggcagtagttttaaatgtatttttctagaatagaaagttaggaacactgttcctgccggatccttaatcatcagggaaatgcaaatcaaaacatccttgagattccacctcacaccagtcaaactggctaggatcaaatattcaggtgacagcagatgctggcaaggatgtggagaaagagaaacactcttccattgctggtgggattacaagctggtacaaccactctggaaatcagtctggcggttcctcagaaaactggacatagtactacgagtagatccagcaatacctctcctgagcatatacctagaagatgttccaactggtaataaggacacatgctccactatgttcatagcagccttatttataatagccagaagctggaaagaacccagatgtccctcaacagagaaatggatacagaaaatgtggtacatttacacaatggagtactactcagctattaaaaacaatgaatttatgaaattcttgggcaaatggatgtatctggaggatatcatcctgagtgaggtaacccaatgacaaaagaagtcacttgatatgcattcactgataagtagatattatctcagaaacctagaatacccaagatacaacttccaaaatataagaaaatcaagaaggaagaccaaagtatggatacttcattctccctagaatagggaataaaatatccatggaaggagttacagagacaaagtttggagctaagacaaaaggatggaccatccagagactgccccacccggggtccatctcataatcagccaccaaacacagacactattgcatatgccagcaagattttgctgaaaaaggatcctgatatagctgtctcatgtgaggctttgccagtgcctagcaaatacagaagtggatgctcacagtcatctataggatggatcacagggctcccaatgtaggagctagagcaagtacccaagagctgagggggtctgcaatcctataggtggaagaacaatatgaactaaccagtacccccagagctcatgactctagctgcatatgtagcagaagatggcctagtcggtgatcattaggaagagaggccccttggtctagcaaactttatatgctccagtacaggggaactccagggtcaagaagtgggagtgagtgggtaggggagcagggcacggggagggtatagaggacttttgggatagcatttgaaatgtaaatgaagaaaatatctaataattttttttttaaagttaggaacaaatactattttatctaatgtcttcaaggttagaagagttagtaatcagggttttcttttccccttgtgagaattttgctgattcataagagaacactcatctccaaattaataatgatttcttacacagaaagatgatggtgaacgccttttaattaccattcctttgttgcaagcctaacaaggatttccattcttcccgaaaatgttcagagcccacaagatgggcaaatggacttccacacaggtctcctgtctcatttcttttcttccattttcagccattcacttccatggttgcttctcaacgggtcattgtcaggatgacctccagcgctgatagaagactaaaggtggggaaattatggactgggaggtcagggggagccattgatggatcctagagctcatgagcatcagtagaggtgaagctttagtgggagtaacacagagtaaagagcttgtgagttttggtgactaatttgttagaaagataaactacacaaagcaccagtgttgatggtgaggtgtctagtagaccgagataagtttgccttcatctaaatgtatgggataaaacaaaaaaccacttttgagatgaagttagcaaaagcaagtttgctttttctcccttgatggcagatttgagtgtgtgtggattttatttgcacatgtgttcatttatagatactctgaacatttgttcagccatatagaggtacatccttcaggagagcacctcttcctgtggtactgagtagcattatattaaatttctttaaaaatattggcagagcacattatcacacagttagcgtctttatctcagtttccctggctcatcataccaggatgaatttaactgggtcctcttccaaaatttcacaaaattttatccaaagtatcaggcaagattggactctcacatgaagtagatgttttttcaaactcttgatcatggaaactgtgattcataaaagctttcctcttcaaggtcagcagcagcataaacagactctgactcttctacccttctttgaatagctcatctagttattgcttggtatgtactatttgaattaatttaaaaccaaccagttaaggaactttagtgtatctggccagtccttctcttttgctaaattacactatctcaaagcaaattactaattccataagtacagagtatcaggaggtaaggacatatatagacttatgtctgtaaccccagcaatatatatatatatgtgtgtgagtagtgtatgtagacatgtgtgtatcatactatatatttaaatagacatgagtgaatgttgtatgcagataacaaattgaaagagtcccagtgatgtagtaacactatacttcctgcttcctccttgtattttttttttcttctgaattctctccaggctcttctaatttcattgttagatatccatgtcttgtcctggcttcacctttcttaggcaagagaccattaaattttctctggaatgtgcttttcaatataatttcctcatcttggcagcagtggtgggcgagcctttaccaaatcattcgtgatccacaatgagcttcagcagcttggagtgaggccatagcctacatgaagaagtgccaccagcctgaagattgtaacgtaaactatgtcaataagacaaatataaaggcatctcccaggcactcatttaaataatgaataattgtgtgacatttatttgtccctgcagtgatgcaaataaacattaaccctttaccatctattaaccctttagtgagatttaaaaagagttggtcgtaaaattctcacgtggtcttactcttaaactcctaatagagtaattagacttcctaaaattaaaaataaggtttttttccatgtgtgtatatttctacatatcactccatagaagaattagatgtggcttaaggacatatttttataagcagaatgttcaatggcaagaaacaggaaaggaaatgcacaggagtcaccacagccaatgctattgaacccaaatgtttactctgacagcaaagatcaagacaatttagcaacttcatttactctcattgatgcagaagaagaaatatatcagttctttgtgcttgtgagggctcagtgggaacacacttatttacatgcctgacttcataggcactctagataagagcatcaacattgttttagtagcaggttggcaacacatccaggcacatctggaacaggactttttattatagttgctttttggtgaactgaggcacaagtattgaagctaaacctaggcaggtgatccaagtgataaattattatgaacccagtacagctagttctgattaatagctggttcttagataacgctcttgacatttattgatcataacattcagtggctatctcagctaaacgtgctaaagtttacttctccaagaagcatttgtaagaaaggttcacgtgaaactcttcttggggaagtgcaatgttaaacattactgatctaatcaagcaatagtctttgaatcccaaaaaggtggctggtaagcggcccttttaattgggaaaaatgaggaaactagccatttagctagccataggccacattaccttgcattcaataaacgtccagtaatatgtactatcagaatatctaacaccttgtaacaccttttaacatctttctgcttctcttggtataaatacccaactctttgctgtcagcatgaaagaatctgcttttgtgactactgcccacagtgaaaactcaccttgcatttctgcatagaaagctattggttacacccttattgttttcgtcactattgcaccagcaggcacatccttccaggatggctgttactgtagcatgcagagctcacagctgggtaacgctgatgattccctttctcccatcatggtgtacatagcagcatccagcactaggaaaggatgctgcttccaggtcagtaccagcttgattgctctgtgtcctatgactcacgtgtatggtatcttcaccaattaggactgagcatgaagttctgctgcgtaaaccagagcaatgattgttaactgtaatatttgggtttctacagaacctcactggccaagcttataagaggtaatccattgccaacaccgtggttttaatctgttgcactgcgctgtctagtaggggcattttttttttaatgctaaaacattccaaattgttttggactttctttagcgtttagtatattatcattatccatggtcatcctaccatgcaatgactgcaatgtaacttactaccttgcaatcaatgtctccctgttcccttcctaaacagctagtctaatttcaacttctgaatagatgatcaacttcttacattgcacatacacgtaaagtatcttcatcttgtcctttgccagatagttgcatttaacataatgtcctccagtcccagtcttgccacaaaacataaggttttgttctcttctgtggccgcataatgtttcattgggtttttactaataacatttgtctcaacattttgctaatctgttcctcaatgttggagacttaggttgtccccatctcttggctctagttaataatgctacaataagcctatgagttcacatgcatcctcaatataattttatttgagaatatacctaaatatttaaccgtggaattacttattctctattattatatgattttttttttaatttgaggaacttccatcccattttctataatgactctagcaatatatattgaaccaacagggctcaacattccatcttcctccacaaccttgtcagcacttgttttcttcagtggttttggcagacaattcttactggggtacgatggtgtcttactgtagttgcaaagtatatttccccaatgatgaatggggaaatatactttaccacatacttgttgtctatgtttatgttttcctttgataaatgtttctttaggtctgatagccatttttaactcagttatttgagattttctttttgttctttcttacttgctattagatttttgaagctctttatacatatgtatgaaaccatacatatatacagttcataaaactttcttttattccgtaggttatctcattctttagttaccacctttgtcatgtaaagaatagttgaataccatctcatttgtcatatttttcatatattgctttaatttttatacttttgagtcctacccaactcccaaccttgcccattcaaacatcccaaaacactcattatgttttcttttggttgttttataagctcatataagtctttaatccatcttagcttttaaaggtggtgatctacttctgtgtgttaccatgagtaacagtgacatgtcctttccttcccactgaccattttctcaggggagttaaccagaagctaatgcatgtcatgtcacagtagaccaaacacaaatatagttccaaggacctagatgtcttctattaagccagcaaaataggaaacaatgtcacttttgctgcttttattattttgtaggaaaagggttttcttttaattgtctttcagttggttttgagaagtaatttggaagtaattacccttgggtttctcagattttaaaggcaaatattttatagaagctatacactttgagttgtatataattatgagggtgtaaagagagtcagagaccaaaataattgagaactacttctctaagtcatttcagtgagacagtttcacccaactttgttacgtgaatgtttttggtagcttttctttcctgagtttcatagattgtttggctaattggcttgagtagctaacacaagcacttgaatgaaaatctcttcactattaagagatttttttcatactcagtaaactctttccagctcattctctggtctccagttccctttcctggatgtagctgctattgttgcatttcctggtaagagaaaatgtgtctgtttactcaattcctagtaagtgatctacccagctttgctatttgcttgcttcccttaataccataacaagagactgcttcctgtatgtagatcagccacagcactgtcaacagttgcagtgtgctccctgtgaatacagcataattctgtccgtttcctattggtcaatgttagcttgtttctcattgttgatatttcctacagagtgatagtgacaaagcttacgcttaattacctgttcatatcaaataagtattcttttaatctatatcagaggaaatagaaacttaaaatttgaactaggccttgtggtatctgccccataatcccattttctggggagactatggcaggagaatcacaagttcaagacctccttgggcttgagaatgaattaaaagtcagtctggctttatgattctgtctcaaataagaacaaaagaattatgaataaagctaagtggtgaaatgcgtgccatgttcacattttattagcacccaaaacaatttttccttaagtatataaactgtccaattaaaatacaccaagcttacccttttgtgactacttttactttcaaagcattttatgatatagcacactttaaaatgattgacatttgccagttggcaagtaacaaataatgccatgtttgttttcaggtttatctcctcatcattgggacccagtagctttcaagaccaaaacccttgtgttgagtacaataaatggaatatcttgaaacactgttaggtccaagaaatacattagtgaagatcatctctggctataggtcactcacctccatatctttctttcactatacttcagtggacgtagcttcagttcctatctctgaaatcagaggagtccttaatattccagatgtaagtgtctatgccagtgaattggactcatttgcaaattattgtcaaaggatagaaagcaccagtgcttttattttctgggttttacacatgctctagaaggcttttttccccctttcctttcctttcctttcctttcctttcctttcctttcctttcctttcctttcctttcctttcctttcctttcctttcctttcctttcctttcctctcctctcctctcctctccttccctttcctttcctttccttttcttttcttttacttttttaaagataaggatacactgcttggctggcctctaggggagaatcataattaatgaaagcctgtgtcagatagaaaacttagtctaacaaatcatccccaaacctcattaaacattgtgtactccccatggacactatgcaagagatttgattaaggggatgctgacaacttcagttgtcatctgtcacagttgcccctgagactccttaaaattgagaaagactttcagaggaagaggtgactatttatatttgagagctattgtcaatagaaggcctctgctaaattgtcacattctgtcttatatacatttgcatagttcttagatggcttcttcattcttggctttttgagcgatggaattagcatcgtttccctagtctttgttcatcacaaggcttttggaatctagggtaagtcaataaaaggtcttctcctttgtgatagaagcaccattttgcctttaactacaatatggccttttagtttcagcaccagaatggtgcaagttttggcgggaccttgaagtataatcagatagaatccagataacaagattttgaataaaaaagctattaatgaaccctgcctatggcagatctgaaaagtgattttctggtagtacatggccaatgacttttacttagctccaacttcagtaaacaaacagggagatgattaagaagatgacatgctggagttagaattgctaattgaataggctgccaattcacagacttaatgtacagcaaatcagtagtaagttgtagtgttctagatctcaagattaaaagaatgtaaacaacgtgaagggctaatcttcctttcctgcccaaatcagaggcaaagcttgccaactgcattggcatcagaacagctcaagtctaagctacctaagctacctccaagttactggcttatgggatatcagtgtgcctctggggtttgggggctcagcttccttgcctgcagaaatagcaacatcctaccttgcagtgagacaacgagatgcttaaagatgaccatccatatgaaatcacacaaaaaacccagcacttaagaagcaacaatttaccatcaccattcctgtagttagtggtagtcatctcaaatgggatttcagaaagatgaattaccaaaataaaaggacctagtaattgctacacaatatactcactctgtttcatgacacagtgtgggaagcttctttggaaacattatggtaccatttcttttggatttggtattagctgtcctaagtgaagcaggataggaactacatattccctctggttttataaaatgctgaaacatatttccaaagaaactacaagaaggctctttggcacatcaggatttcaaataacaggttttggctgaaatggaattcaatcttgggcatccaagtcgtaccacagaacctttagattatatgttattacttatactgcatgaaagaattatcaaaatacattcactgttaacaaatgtatttttaagaacagcaacaaacaaaacatcttcaagttaaattcaccttgattttttttccccttttttctactgaagatccataaaacatgttttgcagttacgttgcttcctttaggtttaagcaacaccttgtttaggcatcaaatattccccttcctttctggtatatcttacaaactcacctttcagaaagaaatgcagagaatactagcctatctcacagaagttgcagctcactacccttttctgataacaaggttgttattactcttggctcatcctacccctaaatagagtggttaaatgaccttgaaatgggagtggctagatcgctagtcactaaaacagaacatttgttgctgtgcttagcctgacagccctggagaactggcatgccagctctgagtaggtctacaagaggacatggtaaatgaggtcaagtatcagtctgtaacatcaagtactacctgctgtctctacctttcccctggagccaaggaaccatccccagaaggcacagctgcagtgattatccataaggcaagctctctgggcacccgagggtgaaaagtcctgccagtctgccggatttgctattcccgtggagctatacaggaaataatactacccaaaataacacattcaagcccagagcacggtctgtggtaagaattcatagacactcgtcacgcatgctcccagctgtttatcaagtgcagtgaaataccccattgcactacaattaattatcagccagtagtgaaataaaacagtaaaagggcgagtgaaatatgaatggaattagtttatttttagaaagtcaatattctaaagtgttgattgattggacaggtgtgtactgaagttttttttttccccctgaatcgattcacaggaaatctcccacattcaggttacagccatgaaaaataaaaatagcctacacgttttacagtttcaattgtaaaaaaaaaaaaaaaaagtcataggcttggacttgggtgggcatttaaaaatattagatgctaaaagatccaattaaagcttttaattctacaaagttccagctgacacctgcttagcatcctctggaccccaggggcttcatcttagacatctaaagagtagagctgcctcacctccccggaagcctgagcaaatccttctctgaagagcctccaagggaggatattttagttgatttcagctccccatgagctcaaaaggatgatgctggcctgtgagttgtccccaggagcactggatgcagagccccgctcagtgactcacctttccagagagccagttggggtttgaagctgcatcatccttttcatcctgagttcttttgaatctcatcaatggcgtcgagggatattttggaaacaatggcatttcgttttctttctccttttttcaggcagaagaaagcatgccttcgacaccatgctcaaactataataagcataagttatgttgtggggggaaaaatcataaaatcttatgtaaaaaaaaatgaaatctgatgcttatgggactcaaagacatttatcacttgttatcatttctattagaacccaaatctctaaaagagtcgtaaaaaggctgcatttatagttaggtcaaaaattcagatacatagtggcaaatgagtgtgtaaagaaaatctcatgtctcaggccatttctttgggatgcctgggcttcatatctgccatattattcttatcaatctcaaggctaaaagaagctagatatgtcactcagcatcctcaaatggtggtactacaaatatagatttgtaagcctttaatcctacaatgtatactatactaaaaccaaaatgttcttccttcttgactgtggtttcatgcctaatttaggagaaatataagtaaaataaaagttatattattacttaaacacacaacgaggcattattctatattattttgatgaaagaaagaatattgtggggcagaggggataaatactagagaattctgacagtttatttttaagcacccaagcaaaccaactgcttcaagaaatttagtgttaggaacactactttgaagttatgttaggtgttattcaaaagcaaagtaatagagaatcgattgtcaggattggttgggggggggaggggatagtccaaacatttgagcaagaacattgtatactgctttggcaatctttaatatttcttgggccatgagtccatttgtgaacctaaggagtttgtcctctttgtccctgtgggttgctggaagatgtttcttttaaacttatataactaacaccatgtcgtagaagttaatcttagtttagaaagctggtagcccacggacagaaaggctgagttcatcttggaccatctgttcataattatccttgccctttccattctaacaacagagacactgggaagtggcttttatttgtcattatctaattaagttcctttatgttatagatgaggaaattttggtacatgaagatgaagaaactttgtcatagtaaggcagctaaggatagaacggggttcaaacccaggcagctggtgctatgatgcatagtctctagtcatagtctctagtctgtagctaagaacacccacatctgtgttcgtagctatccatgaactatgtgttattagtaaccttaatttgtgaatgtagagcccacatggtagaacagtcaggtaacttacccaaaatgatcaaactaggattcaaatcagccagcagtcccagattttatgtgtccacacacatgcatgccaacatgtgcacatgtgcgtgcacacgtgtgcatgtgcatgcgctcacacacacaatgaacgtagacctacatgacacaggagttcaaataagccaatgatgctcatccctaatgattgtgcatggttactccacttttttgtttccctttattctgctttaagcaagtatcactttcatataaaacttttatatgttatgaaaatgtaatgaactctttgacagcttaaaatgtgttaagtggccaaatctcagcctcacggatgagggctttgaagtatagcaacaactttgctggcataggatgtaagtttggaaaggatctgggcatacaaggcatggttgatcagagactgtgtcagtgattggcgctcagggttgtgcatggctttggaagatcagggctgggtggtcctgtggacacttggaagggaagtcaagagtgttgggcagctcaggtcacacgattgaaaaagttccttttagtaacttgaaaggaactgagctgtaaattccagtcgtggacagctaccagttttccctaaggctagccttcactgggccttggtcaactattctgttatggcttttaaactcttgatctaacgcgggttctaacagactttaacagaaatacattaatacatccacagtaactgttcgtttctaacaaaccacattttaatattgtttcggtacttttccaatgtttgtatagaaacctcactatcaaccaccacatagttgttgttcagttctcactatttacttgagtcaatgtttgacaaagctacccctaggactgacacccattctctctaatttgaaaaaaaaacacaaatcacttcattagatccaacggaaggtatctatttctgtgaagagaaaccattactgaggcaatgcccataaaggaaaacttttaattggggctggactataagggtccaaggttcagtccattatcatcatgggaaatagcatggcagtcaccaggcagacatggttctgaagaaggaaccaagaagtctacatccagactggcaggcatctggaagagcaagactgggccttgcttgagcttctcaaacctagaatccaccccaagtgacgcacttcctccaataaggccaaacctaccctaataaggtcctatcccctaatgttgctccctaggcattcaaatacgacgctgtggggccaaactcattcaaaccaccacagaggcataatgtatcactaaactactattgtagcttgaaagaacaattatttattatttatagcaaatctgaggctcgactcactttcattgatttatggtgaatttggaaatagttctataggtcaagtagagtcacatttgtataggctgagagtggctctagtccacattctctgacagctttatgctaggatgaatgcgcttttcttcctatgctcttcttgtggaaagggaagatttggacagaagcaagaacaatgaacttgcttctttgcccacccctttcattacatttgctaacactctatggctaaggacaaaaccaagacacaggcagattttcctgttcataactcaagaaaattacatggcaaataatgaaaatataaggtccagaaagaatataaggtgagaaactgaggtccagtcatgtattccacatcaaaggagaagatgaaaattctaggtctctgtttccttagcttcaaacaactaccgcagttgagacttcaaacatgagagcatcaaataggagtgtcaaaggcagcttcagctattgagtatgcatacaagtacatttacctccaccaagtattcatatacttataaaatgtatctctttcatatcatgagccaaaataaaactcatatcctagaatattcatttttacctaaaaatagaatacaagtggaaaaaaagacaagtaacccttttctctcttctttctcttattttttttttaagttctgatagtttggttatccagttaaagaagatgcatttgatatgtttagatgccagcataagtttttgaggcttagaaacaaagctccaatgatagactgttggtgcatctgattcattgagaactgactttagtattctatcctctgaaatcttatttgttctaaacttagtagttgataactcacaaaaataactgttgattcagaaatgaacttgctcatcagagagctagagacctggctgcttttagtcataacttatttataattcctccccagtggtgttcagagatgaagttggagaaaaagaaaaattcaagtattctttttcatatattttaaaatataagagactttgatgtattctgggaactggagttttgaaaagagagagatagagagaattgaaaagaatgacttcagtgagattagaaaggcccagtaaatcattctgaaataatttaaaagataaatataatttcccaccttcaaaaattacaatggcaacaaattcttatttatcattgcatgcagactacaggtgctcttttgccctggaataatgaacaatcgtttcaatcatcttaggtctgaatgtccagaagtagtttctagcataatctatttttctataggccccagcctttgggtagcattgaactatgagtgagtctttctttcttctttaaatgtaatataatatgattaaatttacctcttttttgagaattttatgcatctatacaatgtttgattacattcactccatcaacctccccaagactgctccagtttacccttgacaaattcatggtctcctctctttttatttcttaataagtcaccgacttcatttagaacttcccacaggctcatgggtatgaggtcaacctctgccatttggacacatatcagagatcacacccctgaagaaaattcattcttcctccttcagctgttgccaactgccaatagttcttagctaggggttgggtctcatgagttcctccatccatgccgaaaagcagactggcttgatcttaagtgggtcttgtacagagagccacaatacctgtgagctcttgagtgcaataactctgttgtgttcagaagagactaccctgcgttgtgtggcatttcttgagtcttgagggagaggattatatagatgtcttatttcatagactgaacattccatagactcctagtctctaaattttgtctagttatgagtctctgtgataattaccttccaccaaagtatgaagcttgtctaattaagagtgagggctttactgaaattgatgaatagaaagataactatttggagctcaatttgatgctatactcacttggcggaataatactagatccacccataagacatagcatctgcagtcataggttcttggtcaagtttatagtagtaccaaatagtagtttcctcctgtggaggtaaccttaaatccaatcagaaagcagttgcttacacttataatacccacaccactattgcataaatgggcacaccttgccaggctagtcattattgtaactcagagttcatgactgggtgaaacagttgttgatttgccttccctgggaagcctgcacatcactttaatgtatgagaataaacctgctaagaggaagtttcccagtgaatatttgatcccttcttggtatttgaattcagaaattagagacaggagctgacaggtctaaggagattgctaaggcaataactactcgcattcatgacgtgaacaaagatgattgagtgaatcatcaacttccttctatttccaagtctgtggttctaaggagcttagctagggtataaaatacgataaaatagaatacatttggtttttacaaagtgggtgggttattgagaaaagaaatcttattaagatgtattttcattgaaatagccctggaaaagaatattgtgaaaaagtgactgtttaagatttctcaccaaaatttgaaggcaatggaggcattttttttctatcaagtaatttatttattcactttacatccctatcacatccttctcccatctcttccacaagactcactaagttccagctaatatttggctgtgagtctgcatctgtttccatctgcttctgggtggagtcactcagagaacagttataccaattgtcatgtctccaagcaaaagagagtatcattaatagtgtcagggattgatcttgtccatgggatgggtctcaagttgggtcagacattagttggccattccttttttcctggacatcttataggcaggacacattttgggttgaaggttttgtgagtgggttgctgtccttattcctccactggaacttgtgcttccctacaggaggtaaccacttcaggtttcatatcccccactgttaggagtctcagctagagttacccctatagactccatagggtctcctcccaccccagttttctggcatgtcctaaagatgcccccctccccactgacaattttcattctctctacactgctcttcctacacctgattctctggcccattcccttccccatctcctctcccatccagttctctcctcccatccacctcagaggtctattttattcccagttcttagaaagactcaagcatcctccttgttatttggcttctctgagtttttgggttgtaacatggctattctgttcttcctgtctaatatccacttataagtgagtgcataccgtggatgttcttaggggtctgggttaccctactcagcatatttttctatttccatccactggcctgcaaaatttataatgtccttgtttttaatagctgagtagtgttccattgtgtaaatgaatcccattttcttcatctaatcttcagttgacagacatctaggttgtttccagtttttggctgttacaattacatataatttgaacataatgaagcatatgtccttgtggtgtagtggggcatcttttgggtatatatccagaagtagtatagctgggtcttaaggtagacctattcccacttttttgagaaagtgccaaattgatttctagagtggttgtacaaatttgcacttccaccagccatggaggaatgtgacactttcagacttgatctcaattctccgtgtatttttatgtatttctatgagtatacttgtgtacttttttcctcatgtttttctccatttgaaactttagctagatctattgattgtatcatttgataccttatgcaaactgaatgtgaagtctgtgatgagaggacagagatctccatgtattgagcaggtgctctgccagtgatccagtaaggtgatcacagtgtcaccggcaaccactatgactgtacattgcatggtcactcagaggaagggctttcatgtgctcctcactacagggtggcttctcttatctgtgcataggaaattcatgcctcacactggactcctcattcatgggagaaacacacacctacagaaatacatttttacattaatatgatgactaatcctgattgtatgcctcctaagtcaaaatcaagtctcataggcagtgagtccttcacctatattatagttatagacagctcaatgctggcaactaaaggttgtaagactaaagaatgtgagtggaatgccagtgctaaaccaaaaacgcaatttgttatttttgttttgtttttgacaaacaaaagcaatcagtaatcaagtagttgtaaaatgcacggactgagctatatgatcttgaaggtttcttccagcttaaaaatgatgggttttgcattggttactaggaaataatagtattgagctgtgcttaggggctctaaggtaagccccatccccctactgggttgcattgttattagaggagcacaaatcacacttgagcctctagtcctaagatttaatatgtcctatacttgtcacattttactgacaataaaaggaaaaatattgcccaaataatatgtgattcttgcgcagtacaagaggagtatcccagagcccttgactcatagtttaaaataattatttttatcaaattcccattaagtcttctaagataattatgtgacagaaaaaatgtgtttgtgtaaaacaaatagcctttcttttttgcattgctatccaaaaaatatgatagccttaaaatttgaacagcagtaatttcttcttcctgtctcttaagaatacattataatgtgaaattgtgggaatagaatgttctcacctcaagaacatccacaataggcattagcctggcaataattgtgaacgttctgtatctaaagaatagatagagtataaaatgtgaactatgaatattttaacctctctggtttagtttgcattcaaattctcttatctttttttttaaatgagttgtgggctttcacaaggtcccttggaaagttgcttttgcaacttcgtagagtccacgtgcctgggttttctttcttctcaatgtcttcgcattttgtccttttgcatttcagattttaaagtgtgctttttgtttctgtgtttgccttcacaagcacaggcaggatttgagaagcttgattgtcttagaatcaaacaaaccagagggataaatacactggcaacagcaggaagaaggaccatgcagaaagaaacagaaggctaaagacctacacacacacacacacacacacacacacagagggggtggggcatgcatgtacacacagagtgaaacagcatctctgcatctgcatccgtgttgtgggaactcatttacccatatatatcaggcactgagctctatcatctataacatctcatctctctgcatctcttcctccctgcctttggcatagaataatcttctagtttgggaaaataaactcatgaataggcaaaggcatagtatttggtccttggtaaacattatagcaaatcactcagccaaacatgggtgaagtgggaaagaattgaaaataccaaggcgatatgatacataagagttggtagacatggtgaacaaaattttaagacttcgattgtggttggtacttatttttttcctttcctcttttactagtgatgacagtatatagagcttatagcaattttgtttaaaaatttttgctgggacaaaaagtctagctctaatctcacacattacacagggttcaaatgcagtgtttttaaagaactataaagacaggatccagaaaaatccatacataaatattctaagtgcttaaaagatgtgggatgttgaagggtgagtctttccaaatgctacttcaaaggaagaagtcatagcaggaagacatatttaataatgttcaactgtattatatgcttgaaagcagtaaagaatggcattactgacaggaatggagagacagttgaagggacacagtatcagttgtcttgtaagaagcaataataatataaacattttaaaatttaaacagttgcaaggcattgacgagtaagtgtctagagcctaaaacaggttaagcatgaaaatatttagttcactactcaaaagacgtgcaagagaaacaaccagaatgctatttagggaattgctgtcaaaatgggagtaaaaaaaaaaaaatcccgttttacctttagtcaacctacagattgctgcaaggtttctcaaaaaatgtgaatatgttacttaaaacttatttatgcactattaggttaataagggtaccttaaaactttatcccatggaagtcaactaaattcgaatgatgggtattcaccatttttactaaatacagcaagcaaactctatcccaacaagaaatagtcatcaatgtgtaattgtatccataggctagaatacctggcacccacgaaatcacactgtacacagcatcagtggaacctcatcttcatatactgctaaggaatatcagagataaacataaggacgccttgtgcatcattttggtgaacacttatatatgtatataaagacctttctttaaaactcagaagagagaactctacaagtaagtggtgaccctaagtgttttattttcagaggtaatgcctattggttttgcctcctggattttcttattgagcatacctttatagttttaaataccctttaagatgcagtttcatacagctgaaaataattttagtagcatgagcaaattatgaacatgagtttatatgaagtatgtgacaattccacaacaagaatgttttaattttatagggcagccataaaaacttttaagggttgtaaaagtaaagtttcttgataaattttatgtttctttctttttaaaattttacaagggacatatatgatgtttaaattcagaaacaaattatttctaaaattctcctctaatcttattcattgatcattctcaagctgtatgttgatatgggctctatatttctaatgtttttataaacattgtctcctgagatatgatgaaacattatcaatgtaaccaatgggatatgcatgtggcatttatattccacacctctgcatgtagtcatggttctgaaacaccaaagggcacttcctgccattgttcccactgtttgaggaagcttttgtctgtgctttgtcaagagttggtcctacaggatttgacttttgttctgtttttcttttgtgcaggacataggaaggtactaatagaatgttaatgataccagggtgttaagcagaattctcaattcccagaggagagagctctcaatctttccatctcatccagacatccaggtcttctgtctttatcaattttttaaattagtgacagataattcgttaaccatgggaacaaaggtgtagtccatgcttgtctggaaacatacccttagcactgaaaactctctctctctctgtctctctctctgtctctgtctctgtctctctctcccctatatgtgtgcatgtgtaagtatgtgtgtgtgtcttttctactgccaactgattgtctattgtagccttagcaaaggactctgtcttaaatactagcttgtaaaccttttataatccattatgagcaccccaaaattatcaacatgaaataatgacagcattttatatgaatactatatgacagcattcatatatgtatgtatgtgtgtgtgtatatatatgatttctttgagtctctcacttgacagacatctctctgtgtggttttaactgaatctctcgtgatatcacaggtaaaatatctctctagatttagatggggctgaacgattgccctacaagttgtttttcctacttgtctggcacagcagtgcttgtggttggctaaaggtttggtccttttccaggtggactaagtctagaggacagtttaaaacacatttgtggcacaaaaaccatttcacagcggagattgctccattaaaagattaacgtggaagctgcagggtcttatttattttttattacggagcctcagcagtcacaaagtgtcacttcctttgttcactcagaccaagcgtactcagtgtgagaaagaaaaaagaaaaagaaaaggaactacataagacaggacttgcagaaggcaacaaggatcactgagtgccatcttgtgggctggctaccaatgaaatctgttacatgaccccaaatgaatcacttcctctcatgtaagacatgctcacatctttgtcatgatctccagtctcctattatggtattagcttacatgatctcatcatctaagccgaaagtattggttttctactgctggctcacaaatctaacatctagaaataacaaccatttattatcttgcagatccagcagtaagaagtctggggataaggttcttagctcatgaattaagaaaactcaaatcgagttcctagtcctggttgccattcttggatggagtttagagatgctctctaaatgtatcaggttattgggggaagagttaggtaacttgtggtagatagaataaagtatttagagactaccaaggccagtggttctcaactttgctaatgttgtgaccctttaatacagttcctcatgatatggtgaccctcaactataaaattcttttcattgctacctcataacagtaattttgctattgttatgaatagtaataacatctgatatgcaggatagctgtgacccctatgaaaggactgttaaaccccactacggggtcacgacccacaggttgaaaccacaatccttgacactataccatatatagcctttgtcacaatgtggtggtttgctctttcaaaggttagcagacaaatctccttattgctttacatttataatttggcttttatctctactaccagaggtaatgtggtttgatctagtctaccagcaggatatccctttgaattaaatcactctgctcattatgttacattgtatctgcatagttctttttgaagggtacactaacagaattgaaggttagcatgcgaggagtggggattaggtaagctctccacacttaggatcatcctggtgcggatgcgttaattctgtattagttcactattgctacgcaacaatccaacaatccccagtaacatctcaccgttctattatctcttgagctggacgtcaagaaccattcagggttgccagaaattggggcaatatgtatttctagtgaatttcactcgtttgaccttctagtaaatattagctgttataaaagaccgtacgggttctgtaaacgtgcccatctccaggaagcatgagtgtcttcgtgatttgaaacactcacctgactgaaccagcgaaggcagcaagagaaacgcagcttccttgtaggccccaacttcgactgtaccatcacttttaggactatgactggtttcacaagtcaatcctgatatattaaagggctgtgaacactggagacttatgcaccatcttccaagttatcttgtagactggccttcataaccacaattaacaacaaaataaattaaactttttgaatttctctttacctacagaccatagtttcccctcggtccactccctccagtccaccgctcccacttcccctcttctctcccttccatccactcctctatttctcctccaaaaattctaggcctccccatggatagcaaccagccatggcctgtcaagttgcaataggattaggcacctcctctccattcatgttagacaaggcaacccagtaggagaaaagggtcccaaaggcaggcaacagagtcagagatagccctggctttcactgttaggagtccagcatgaagacccagctgcacaactattacacatgtgcatagggcctaggtaagtcccatggaaactccctggttggttcagtccctatggggactaggttagctgattcctttaaagtaaagggaagagtgtctgaaatcggtgttttctctcatgcccaccgcaacagtctctatgggctatcttctctgttcagttcatgtgcagcatcacaatcattatacttatttccattgttaaaaaatttaaagcactttaaatggtctagataaaagccacaccacctgctattttataacccattaggtaaagcctttaaccaggcattgtgacacatgatacatcccagcatctcgtattactcccgctacatccacacctactgttacctttgagccacacttatgagtttcctattgccaagtaaatgtagaaaatgtatcaagcgcccctgtcaaacacaaaacacaaatattggattttcgatactagtgctatatcataacacctagctaaatgtaaagaattcgacaatgcaatatacccttacaacacaactcaagatttagatttatgaaagagttcttaagctatctttatgcttggatatctccggaatgctcatcttaaaccaagacaaaataaataactaacaacaaccaaaaaaaaaaaaaaccctccttaatacttcaaacattgcaatgtgaaatctttctctgcatatagtgtagaaaattgaaaatatatttgtatctattacctgtagcatccttttgaaaaagctcaccaattgtaactcaggagtttgacattcataagaattagactgcaaagcttctttttactttctaaaacaagtgaatttaaaatacaaataagatagatgaggatttatggatgctacatcctgtgtacataaacaatcaatttaataagcacagagccaaacagattcctagtcctctatggtatcttgttgtctgtattcattttgttttgttttccttgctgtccaaatagtgtttaagtttttcattctccctttaaagtcacaccacattagtttaaaattatataaataaaataattaggaccccactccataccatgcaatggtctggaactagcttgtatttggtaaagactttctttgttatttttattttattgttttttgaaattataattataccactttatacttccatttctttcctccaaaccttcccatgtatcctcttgcttgttttcattcaatgccgtagtctcctctttcctttgttacatacagtatgtatacgtgtctgtgtctatgtgtctctatgtgtatttttcctgaacacatcaatacaacctgcacagtgtgtataacattccttgtgctcatacgttttcagagctgaccatttggtgttggataaccaatgggtgtgctcatctctcggggagactatgtctcccactctcagcttcccttagttgcctgttgttctttgtatagagctgaggcctcaagagcttcctcccatccgagttagcatgtctgatgttgtgctcttggtcaggttatgtttagggagacatgttggtgagactttgtgggcatagcttctgacattcctaggagacatggtgagtagacatcctatgttcctctggttcttacaatccttctgctctaccttcaggaatgatccccccagccacagtggcaggagttgttttctagatggatgcactggaactaggctccacagctctgcatttgaattggatgtggtttttcttaatggtaccaatctcttgcaaggagacatatccttgataaaagatacgtctgcgtgtataagggcaactatttagaatatagttaaagactgtactggttcaataaagtggtagttgtaagttttttctctgacatccttgacttcattatgcctgagtggttggttaggtttctagtagcaggcatgatttccctcttgttcagtggttcataagtccagttaaagaactggtggttactgttaaagttggtgcaggactagagtctttgtgccatgctggtcatagttgcggttgataggcatcagctgggtagaactgtaggttgcttctcacctttggaagcctatatggaacattctggtaccaagaaagcaagatctcagggaagaggttttcaggtcagctccagctccatggtttccctgtacccaaagtaaatggcgacttcatcaatatggactaaacttccatcttttggggggcagcaagggcaatagaggtaacccatgatgttctgcaacatgaacaaccctgaccaacaactcagacattcttactgctattttacccttctccttatctttccctccttaattagagcccctctgtttccatttcccctttcagatgacctataatctgatatttttcttcctccacatttctggaataatctcttataactcataaagattgtttcttgaaaaaaagcattctctgctttaaaattcagtttcccagatgaaaacaataatagtttaattgaataagtgatgaattttgccttaacgtagttttttcatctgcttactgatcaaagaaataaatgtagtgcattttaaattgtatgtgtgtgggggggcacaagtgtgtgtgtgcttatgtgttaagtgccccttcatatgtgtgtgcattcacatgggtgagaaagcttgatttccatcatcttccacaatctttcatcgcagcttttgagccattgtagcttactgaacccagagctcaccaattcagctggggtggctggctccaaagagctccagatattcttctgtccagtccctcaagcactgaattacagctctaacctccacccggcattttatatgtgggtgctagaaatgaatctccggtcttcagcttctatggcaatcatattaccaagcaagctacctcctctgcccatgttctataacgaaccttgtaagtgacttctgctatagagatatttctattcatccattatcttcccttaaaaatgctttgttaatagccaccctaacgggcatgaggcaccgtattgtggttttgtttccctttattcggtcttaatcctatcattaagggttatttattgttaacacttggtatgtttcccacttttatgaatctttttctttgaaaatgggaccccagtatataagcagtttggtaactgcttttaagaggactctgctatgtcattagaaattctttgggaccatcacatttgggctgtaaaaacttaacaaaaagaaaaataggatcgatctaagatggcgactgtggaaccagaaaccacccctaccactaatccctgacctgtggaagaagaaaaaacagagtctaatcaggaggtgctaacccagagtactatcttaaacaccctctacagaacaggtgggcactctggttttttaaaaatgataaaagcaaaacttggcaagcaaacctgcgattgatctctttagtttgatactgttgaagacttttgggctctatataaccatatccagttgtctagtaatttaatgcctggctgtgactactcactttttaaggatggcattgagcctatgtggaaagatgagaacaaacaaggatggctaattacactgaacaagcagcagagacgaagtgaccttgatcccttttggctagagacactgctgtgaattattggagaatcttttgatggccagagtgatgatgtgtgtggagctgttgttaatgttagttagagctaaaggtgataagatagcaatatggactactgagtgtgaaaacagatgcagtcacacacatagggggagggtatacaaggaaaggttaggacttcttctgaagacagtgattggttatcagtcccacgcagacacagctacaaagagcggctccaccactaaaaataggtttgttgtttaagaagacaccttctgagcgttctcacaggagactgcgtcatgcaatcgagattgggagctgaaccaaagcctcatcaaagcagagtggacggcaccggagttgattccatccaagtgttgctaagatagaagagaagtctcatttgtctttctcttgtatttctgtgttcattctcctcccccacccccaatttttgctagtgtgtccactatcccaatcaaagaattacatacagtagacatcaccccagaacccacagatgtgttcctggccagctccataacagctgattagaattaccatgacacacacatttgcctttctatagtattcgaaaaagaacttgcatttctactactttagcaggaaagaactggttttgctccactccacaggagtggcataggacattgctggtgtgagagtcttaagtaaagctttccagcaacctccagtctcccttcacagcattgtcctctctgtcctcttgctgatggctgctagacttaatttatttgcttccctccttgataacattagtgattctgatttcaggttttcatttgttttgcttttgtttttttttttttcctcatgtaacattagtgaaggatccaggaatatgacagaaaggtggaataaacattaaatttgtgcattctttgataattttttttgttttttgttttgtaactacaaagctttgctacaaatttatgcatttcattcaaatcagtgatctaagtctgtgtgattcctgaacataattgtggactataaaaatgtaacaccaaaattccattcctaactagaattagtatgcctgcatttgtatctttatgccgtcttttaacgctttgtattcttaggttatttagctttggttacaatggctcaagtagaaaagtggtcccatccatattaagacagtgtagaaaactgtaaataaaatgtgtacagtgaattatctttttaaaaaaaggaaagaaaaatatagatcctactgcagtatacgcattatgtgtccacgttaactaaataacagcgtaattgaaataagttactgtaatagaactcacaaccataatatggagagtctaacctggaccaccaggagtgcttccagacaatgacatgggtgagtcttcataataccctatcatgacattacatttttaaacaccaaattcatttcaaagtacaatgaaccaagtaagaaggagaagtcagctcccggtagctgtggtaaagcaatgttttctcactagggcctttcctttattgggtgaggtaaccaccagtggatatttttcacatggtgtttttcagaataggaaatagctttagggataaaaaatcaaccagctttgttactaaaatcatatttgtggttaagatttgctttcactggaacaagtattctttgtttctaaagatttatttgtttatatagagagatagatagacaaacaaatatatatatatatatatatatatatatatatatatatatatatatatatatagtttacctgtgtgatttttttgcgtttttgtatagcatgtgcatgcagaagcctgcggggaccagcagagagcatgggaatcccctagaactgcaggtacctaagagaggttgtgagctaccaagtgaatgctaggaaccaagctcaggtcttgtgcaagagcactgagccatctttccaacaccactgctcttttacattttttttaaattcagtctctttctgtctctctgtgtctgtctctctctgtgtgtatatggacacgcatgtgcaggtatgctagtccatgtatatgttattcatggcctagctcacagtatagaggtcatagaagaattcttgggagttggttttgtctttcttgccattgtttgggatactgagatcaagtacaaaccctcagacctgagcacaagtgcctctacccaatgagtcatcttgtcacgtcagaagaattggtctttatgacactcaccagtggatcttaaaactgttgtggttgtttatcatcaacattccagtgacctattataaaacaaaaggcttgtggaagtttctagtcattgttcataagttacagttttgtgtttatgatgttattgctaagaagctaggctggaaacctcaacctattatttgatcacagtaatttgggcagagggactggcactaccatggtgttttgagcaacttggcacaagtcaatagcttcaggaaagactttcagagcagacttctgtcaaatttgccatatggagatactgggctgggattatggaggttttctggtggcttaggcattactggtgctctccaggacttttgcctgacaaggggaactccatcaacaaaacctcacaccttgagaaagggaagtggcttgatatttgagggttttaaatgatgcccacagtcccaaaagttgtcttccactgatctccatcttgcttctccatcacctcacctagagagtgccccagagttcaagtccacccagttattgaggagcttattatattcctatatggatatatgtgtacatacacacatacactcacacatacatatacatatatttgtgaaatgaaaataactgaaactaaagaggccaaggagttgaaggacagcagagagggatatatgagagggcttagggagacatgttttaattatattataattacatacatacacaaagatacaaagacatgaaaacctattttagagcaagaaggtgcagggaataatctaattttctgttttagtgttgaaaatactgggaaatactttcccctctcaaagcttgtcttacaaaggcagccagcccctgccttttacaagtgcctatctataagcactgtccctgtttggatagatcttccttcccatctctcacctcctaaatacacagacatgttgtcatgccgccattattgtccatgagataggttctcttgcttctcaaattctatgagaaatcaatctgaagtgctcaggtataacttgaaaactggcatctcatagataaattccaaattacattgtcaaagcccaatattaaaatcacatgattttatatgcaaatccagatttgctgtttctcctgagacaccctcggttcacttgcctccctgcagagcatgctgcatctgcagtttgaacaagtagctagtcccctggctggcaatctcttctgaggtgaggctgagggattacatccctcatgactcacagtgggcatcatggctttcctgtctcatttgcattataagatgttcttgacaagggaactttgtatccaccaagagtcagacagagtacagcacatcagaaaagcacctctggtcccaggtggaacagtgataaccaatgctctagtcctctgcttaatcattctgcaagagagttaggtgatctatatctcctctattgattattacccctttttaaagcacaggttaacaatttctagaggtccctaactgtagtttcagtacctgttcaaaaggcaggaggataatacatttgaagctagtttgagcaacttagtgagaccttgtttcaaaataaaagctaagacatgcaggtatattactcagtgactcgtagtttatagtacatagatagctttaagttcattcccccatatgaagagggggaaaaaaggaaatgaaaactgcatgaaagtctgttactcccaacacacacacacacacacagaattttcagtgggatggtctgggacagctaaatatcaaaacaagcatttcaggtgactcttatgaaacacaaccactcttgaattctttctgctcttctgctataagttcctagaagaaactggttagatttagacaataattccaagccccttgtccatgtccaacaatggagaagatgcaatatctcgctttatataaatttcaccgacactggccgttttcaatgcattcagcggtaaatcgagtgtaatgggttagggagataatttaagcatatattagcatactcaaagatccagctttgccatcatcttttcctagtcatcatacagagttggagagtcactgggcctctgtgtttattttttttttctgaattaatgttttaagtgtggaattaaaatattacccatctacttgccccatttcaaatcaaagagaggatttagccagatgtcattagtatgtagtagcatgctcacctcctgcagtctatgagtcatgcaacaaccctgaccgtaaccactttcagaattgtgggcactaaccaggcattgaaaccctgggaagaactctgtttccttccaaggtgatcaataactgacaattaccataaatgtgcagtttccttcactcccatattcacataaaaactgacaaggttgtgtaacaaattgtatatgcgtgcaggttccgaatccacacagctaacgcactcatgaattattcagtgaatcttgcttcaataggatttctgtgtcactttgatgtgtgaccagttttagataatacattaaacgctatacgttatgagacactcactgggtatattgttcaaaccacatcttgtgttggcgactctgttacggttcctgccagttgcctttcttcagatttccctatgtattttagccattgaacaaatatgtcctcgcctatctgggcctggatattcaccattgtcaactatgcaaacatgaaaggggggaaaaaagcaactactattgtcctggggttgctcttggtgtagaaaaaaaaaaaaaaaaaaaaagcaagtaccctaaatgggagaagccctggggacaggacttcatggctcagacctgcaggctgaagagaagctgctgcaggaagggagagcagaagtggcccaggtttccatatggctgagtaacaaatgagtgtagccagggggcttcaagcatcactcggtaccttagtttctctgacatgggagtccagctcagatgacctggccccaggggcctcacaggctgcaagcaggtgctcattctattcattcacatgacttctgattgagatttctcccaggctcctccacgccataggcagcagtcagttcctggaattataggactggtttccgcttccttgctgaaggtcgatctggggttatttctgctcctgctgctgtctgctgtccctaccctcttatacccccctctcagaatacccatgggctccttcaaggccagcaggagaacgtgccccttttaggaagggcctagttactcagctggtattgacttcctcttgaagtcagacccagccaagataaccagcctttcgattaactcaaaagcacctgatacaggattgttgattcccatcctccatattctataaaccggtcatggggagaactgatcattaggcttccaggccagtgtctcataaaagagaagggaattatgtaggctgtatacatatgtggacaagaatgctgggggccctagcacaattctggccatacaagaaagcatagttcaatcaagaaaatatggcagaagtcctatatagaaaaatagcaatttccaatatgaacagactagattataatgtgtaggttaataaccagtgcatattctataacacaaatatttaaagatcaatttcaaaatatattttgaaatatggaaaattatattcataaattactaagtgagaaactcatgatctgtgtttaagcaatgtgatatcagttttttaaaaatacacgcatatacatatacaaatatgcacatatatatcatgaaagactataattaaatacatccatgttagtcttcaatattttgggggtgggaaatgtggataatttagacagtccttatcctgttccttgtttctaatattattctcaatcagcatctcttttaatactatgaggccaggaatggaggtgcaggcttgtaatcccatcactgtgtaagcaaaggcaagaccatcaccatgaagtcagtgtcaaccaaggctccatagtgagttaatccaaggccaacctgagctacagaatgggatattggctcaaatgaaaacaacttatttttgggaattacaaacacaaacctcaacagagttgtctttaaaaatcatttgtgagatttttttttcttccccagatattttgccaggttgaaagcaagctaaggcattgtcaacctattggctcaacaaatgcaatgactagttgatagaagtaaattcctgactcagtcaagaatgccaagaattcaggagctgcccaagagtgtgtctgaaggctaaataacaggtagaagaccaaaattaaccttttcacccatttccttatatctagaaatccaggcaagtaaaattccagttaacccagggctaattacaaacagtatgcaaatgacccaaactttcagtgatcagtcaaactccctgtatggcatagatgtttaatcaattatgattgtcagtattcactggatgtaagctgacagggaggaaaagatgactggctggtggagagatggctcaggaattaaagagtactaagtgtcatgaagacttgaagaaaacctggcaccctcatctggtcttcataggtagcagacatgcccatggcacaatacaaacacacacacacacacacacacacacagagagagagagagagagagagagagagagagagagagagagagagaaactaacaactacattttattttcaaatctttaaaaggaagaaagagatggctggaggaagcacattctatttcctacaatggtacagtctacgcaggaacagttttaagcagagataacctacacaatatcacatccaggattactctcaggtgtccgcctgggagaggaagaaagacaaccagaagggaggtgggaaatcagaaacattgacaacctagttcttcagacacagcttcaagtttcaagagagcagttaacagcaaaggggaaaaagtatttttagatgttgtttgggaggtgaaaggatttttctgggggaggggagagaagggggcaggaaatgggcagatgagatttttttttttttctggcactgcaaaatctcagagatttttgacttgcaatatgacaaaatgaggttttcatctctcttgcttaaaaaaaggaaggaaagaaagaaggaaaggaggacacactagaaaatgtcaatgtgagacataaacagaccacatttctaattcatggcaaggtggctaaaataacaattcttaaaatacgtatcttaaaattagatttttgaccttcgatagggcttatcacgctatttatactgtggcagtaggagctgcttcttcagtggccgcctcatcaaaggcatgactcatgcttcctaaagcatttacgccatatgtttcctggggtaaaagaaaaaaaatgcatattttttatacaattaccgaaacctgaacagaaacactaggaatcatttaaaagatgcttttggaagcatgtcaaaagttgatttgtgaaaactaacatttcattagacatttggctggaacggtcattaggtcatttatgactataaacaagcaattgtactgttgtctaccttcatcacaaagggaaaaaaatagattaaaagaactgtttagcagcagagcacaggtaggaatgaaacatgctctatattcagaaattttaaaacattctaaacgacctgaaatgaatcattttaacattgaaagaaggaaaaaaaataagttgactgacatttggtggcattctgtgtgtgtacaagtcctgactctgaggtaatgagacacatcattttatagccatttgaaattgaaatggacataacatgattattagccctttgctcaaatatatttatgcaatataaaagctgtactgaaaaagtcctgggggggggtgatttccgtttaagggctgggaaaattctctttttaatacaacagatgtctatcagagttccaaataaggaaccctaatttcccacgtgccgttcaaagcagttgtcatttcctttccttctatgcatgtcatatattctccatcacagttacctggtccctggactccctgtcccgagctgcactctcatattgtcacgaatgccaggaaccagtgttcttgtcaccagcagcctgggagactagggacatcccctcacttctcctgtagactctatgcctactgatttgattctgcatccttagcatcctgcagacagtgcctaaccatgccttctcataatatggtccagccctccctccatcctcctctcctcactaatgtctgctccatagacagatgtgttgaagtctctgaagacctgacctgttgctcccatgtgtgagtcctcaaaagcttcctagcacctgttactagattcagcccaacacatcaccttgggggagcaggctcttcttcactggctttgttcatccccctagaaggctttttgtacctctccctagtcccttctcatcatacatatcctgatacattcactgagcttgtctcgctgaggttggatcttctctacatggtcttcctctatgtgcaccagtcttctaatgccttgaaatgtttcacctccaagcctttccttttgcttaactactacttttaatggatgactttgctacaagaaaaggccacctcaaggaagccctctctccctgtcttgttcccaagtagcttctctgctattatgagcaatctgttatagcctgaatctccttaaattggaattgcatgttcactcatttcttctctagattatattttttttctgtatacaggactccctgccctctacccagcattctctatgtcctagtgatagctagagcacaggaaacattggatactactaaatgaatgtgtatgaaataaaataggctttgcccctgagcattctgaaatacaaaattaattacaactctgcttcttccccttatatctcagtatcattcaggagggtctcaggccactaaaaaaaaccgacaaacatttttaaacaactaaagaaatcacaaaaagaatcagccacttgccatgtctcagtatggtcctaggactaccttcctgtgtctacactagctcatatagctaggttcttcatatcgactttcaatccatggaagagagagaaagacagaaaacgtcatcccataccttcctaaagcaggcaaaggtgtactagtccagccaaactttatgactcattggatagatcagtctctcgagaggccatcccaactgcaaggcaagctagggaagttagtgttttgaatatctggcctctatcctcgaaatgcacaagagccaataaatgaagggacaatgtgtgctgtactctgggacaaactgtgttacctcttttagccttgcattcttctcttccaagagaagtgaaataattgcattctacggctttcatgtattctcttgaccaaagtgtactacctcctacatgagacagttgctctgagtatctcttgaatactgtgcaccgatagaaaaccagggtgggtaaagagacccattctttctatgagaccccaggtagtgttctccccagctagggctgcacaaccagcaatgcttatctcctgcctctaactgttcctatcttccacagtgaccatgacaaatataatgagttcctccaatcttttccctgctgggatcatattagctttgcttaaatagttttcctgatagtgtcttcgtgtcctcttgtaagcctgatcagctaacaccagacgtgctctactcaattatttatgattgattgaatagataccttctgagctgaagaagtagcatgctaggggctcatgatgggacaggatgcagaacaaatgaagcttctcttctctgtcagatgagtggagagaagagactataacacacatggcataaaggagcacttgtgcagacacacacacacacacacacacacacacacacacacacacacacagagttttcagagagtgatttattaatgccaggatgagactgtcacaggaatgagtggcagaataacaggtgtgtgtgtgtgtgtgtgtgtgtgtgtgtgtgtgtgtgtgtgtgtgtatgtttatgaagatgaaggtcaaaacttctgattttggtagttgggaaagctctttaaaacacaaatatcaaccaaactgccctgacctcccagggactaaaccaccaaccaaagaatacacatggggggtcctatggctccagctgcatatgtagcagaggatggttttatctggcatcaacgaggggggaggaccttggtcctgtggaggctcaatgccacagaataggggaatgctagggcagggaggctggagtgggtggatgggtggaggagcaccctcatagaagcaggggtgtagattagagggtttgcagatgggaaaccaggaagggggggataacattggaaatgtaaataaattaggttatcaataaaaaactaaaaaaaaaaaaatgggaagaaggcatgagaatgggagaagaagagttttgcgaggagaattctaagtgaaagaccctggataaagaccctagatatccagaccaaaaaaagaaacgggaagctgctcagatggtagagatttcagagatgagcttgagaaagcattcaggagcatagagagcaaatagagcagacaagaagaaagagtattcttaatggtcatagttggaatatccatctcgagatgtgcccagaaggagaagaacacactgatgtacatatagtctgactggagcagccaaatttataacttctgctatgctgggcattgtgtttctagccgtgcaggctccaattacaggacttatattggaagttgttatctctcctatccccactgcgatttcccatccactgccactcaccactcacatggctgaatatgactcgcacaaatggagagagtaggtgggtatgatgcaaggagctattaaaatgattcacatcacattcctaccacgagaaaaaaaatatatagtcaaaggcaatgctgcatcagaccacagatcatcttgaagaagtctaaattacacgtctgacatccagcctttcataggaatgtgatcatctggacaggccggaaaatgtatctcttgatttccccaccccagaagcaaaattgagtgataagaacaaaatgaagtgtaggggaggaaaaaaaaaactttttaaaaatcgataactctaactagacagaagttgagtagaaagagccaaactattgctacttaactgggtgtgagccaattaaaggttattgaatttctacctcctgaaaagtcctaattgcctttcccacagtaaacacaggcccagagatttccccctgagctgtggaagtctgggtctgtcctcagagctgcaatggtttctgggctcctcagttttaatgctcaggttggggcaggctgctctaagcttgccttgctggctcctttcctgccctgggctcacactcaaccgtgcacggagcacctgctgttcagtcacgcaggcatcaaggatcctgagggctctctttgcccatatggcactgagctttggttcatcattttcctctctcctatcagtaggtattctagaagacagttttatgatgacattcgcagctagcatgaaatccagataaaaataaaacaggatgtcaataaagacctaatgatgtgtgtctgtgtaaatgcataataataataaaaagaacagacatccgtttgcaaaggtgccgttttatgccatgaggtttccagtgaagccactttataaatggactaacatatgtgaatgtttgcccacgtctttcagccatgaaaatcgcctcctagacagctgacctggagttgaaaagcaattcatgagcacgggatcatttactagaacacctttgctaagtggcaatctagctaccttcaccacggaaggttcagtggacagctggaggcaactcaggggtcagggtcatgcaaggcaagttttaaaacaagttgggaacctgatattttcataaaatggatttagacgcctaaggaaattagatgtcagatcaaggcaaacctcctaagaggtaagtggccactctcctgggcctgcagaaacacttgcaagaatgtcactaagaatggtgatgtctggtgatacccaccattggccagtgtcacgtgatatgaatgaacatctcagggctataggtcaggaatccccagggactccatcatggcctgctttcttgccctcttgaaaacttttccttccttgttaagtcaggggctggtcctcagattgtgtctagactagtactgcaaactgactttcctaggaaccaggaggagatttcctaggagccaggacagggtagggttggggtacagggtaggtgggcagaacaggactttctctaccctcagttcttcaaggtcaccagaacaactctacctttctcccatcaggccttaaggtttttgtaagattctacattttataaaagagtttaaatgcctttattttttttaaggaaaaaaaaaaccctcaatgattactagatgtggggtaagttcttttcaactctaaaatagaataatttagcattctgattaaaatatttaaatgatatacaactatttttagtggttataaaattgccagtattgctaagcagtgttagttacagcaagcaatggaactgactctatcctggaaagcagactacatcaatgagcaatacaaacgttttaagagctacaaatcatgtgcagaaccaatatcggatttactttagtaattatttttattttcctaaagacatctgaactttatttgtagaaagccatcttcatacctcttcgtcccacaacagtatgactgtggctagtgtgccaccgtctacaaaattgaaaaactcttttgaaagatgcatttgctctggggacatggaaaaggtgctcacaattaatgttaaatactctgctttctggagagtgatgagcaccaatttagcacatatttcctgggctgcttttgtgtggcaagcatattcctggcgttcggtttcatcaataaataaaatagtaaccattcttgccacaatggtgcttgtatcatagataagaagcagaagattcaagtatagttatcacaactctctcatgcagggaatttggagttcaggtagtaaaactaatcgttaactcgtagaacagttaggtgttaaaataccagaaacggacccgtgctggacagatttgtttcaactcgacacaagctggagtgatctgagaggagggaacctgaaaaaaaaatgcctccatttctcaatatagtcgttggcaaacctgtaaggcattttcttaattagtgattgatgggtgagggcccagcccatcgtgcgtggtgccatccctcagctggtagtcctgggttctataagaaagcaggctgaacaagtcatgaagagcaagacagtaagcagaactctaccatggcctctgcatcagctcctgcctctaggttcctacctgccctgacttccttcaatgatgaactacactgtgtgtgagccaagtaaactctctcctccccaatttgctttttggtcatggaattttgtctcagcaatagaaaccctaaatgagtcagaaccctagttgccatggaagttttaaagttgttagagggctgaggttggctggacttgaacatggagtagaattagataggccattcctggcctagtgcgtgacacatagtagtcatcacttgatacagacttcttgagtaaataaaaactagggctaagtggatggggaatagacatatgtgactatcaggaaagtagctgagagttaatgtcagaattagcccagttgaagggattgctgaatgagaaatggagagccatggatgggaaaggtcatgtggcttgtgacggcatgttcatggatcatgaagaatgtattttctaggatggattaatttggtgatgaatcagtatttgagagagactgtagggagataaaagatgagagaatagaggtgcctctggagaaggggcttaaagaatgaaacaagtatcatgggaaatttcgtcaaggacctcgctcttcttccatataccaacataaaacagcaaaatcaaattacataatcctgttctctcccttctgtttcccttccttctcccttctccttcccacccctcctctctcccttccccctcctcctttccaccatctctctttttcccttactgcccatctctcttccttcctcccatccctattttcattcttttatttcattctttctcatatatattcatataacatatagtacatatttatattatatataaattatatggatacagacataaatcatgtagatagatgtagatctaacatatctatagaatgatatagaggtaggtaggtaggtaggtagatagatagatagatagatagatagatagatagatagattatacatgaacaaagccaggttctatatcttaagataatagtaggcaaggagtaaggagagcccaagtttacaaccagttctccagtttccactttgcctatttgtctgtttatgatgtcactcaaaaaatcagatattattaactttggtggaaagattatttctgataattattataatgatttgtgtttatttctccaagtcaaataatttgtcattattttatattattatgtatatgtatatacataataatataaaattatacatacatatatatatagtggcattccaaagcaatacatatttgttgtataaacttttagacatatatacaagcaaggaaaatcatgatatcagaaatgagagctttcattcagagtaaactcacataaataataaatagtatgctaactatttgatgaagctaatgacgattgtattacgattgtgatactagtggtgttggtcatgatgacagtgctcacaaactctgtctggctgtgtgcatgatgctattctaagcattttttttacaagtcacacatgaaatcttccatagcttcaaatctcacctattcccacttattacagtttgtactattgcacagatgaaacatccgtgacaaaggagcaaagtgatgggatcagagtcagaaagcagaaagttgtagaaatggatgggagtctctgacaacaatgaaactgccatagcctttaagccagacgacctgagttcaaccctcagggttcacatggttaaaggagagaactgactcctacaaagtgtcctctgctctccatgtgcatccagtggcatacataccacaaacacacatacacacacatgcacacacacatgcacatactcatgtgtacacccatgcacataccacatatacacaccacatacacacacatgcacactcccatgcacacacacacctatgcacatacacacatgcacacacatatacacacatacacatatacacatatacatacatacacatatgccacatatacacacacatatacacatatatacatatacacatatacacaagcacacacacatgtacacacaacacacatatacatacatgctcaaatacacatgtacacatacatataggcatgcatacatacagacacacatacatgcccacacacatatgcacacacacaaaaatattttaatgaaaaaatttttaaagaaaagtagcaggctgaatacagctagatgtcccagcaagtcacaccagttttatgagcagtcctgaattgcacctctgcaggagtttgagagagagagcctgtttccccagttattgagtactactcttcagagtaagttgccctcatagaactatgttctctggatgggagcccctcccctgatgtttttaactctaaacccacttcaccagataattttgacctgaagaagcaacccaaactcattgttacccaccaagaaaaacgaaacatcatcaccctaatctatgtgccagggcattgtgggagtgggagctattattaccatcaactgtgcctaccccatggcatgagccccttgttagtggctgatggggaaagacggtccagaacagaggagaaaagttttattttagtaatttattaaccccttggtatggctgctgagttgaagcaccatatgaatattaaaagatgaactaagaagttctttatgtgatatggcaagctatttacctcctccataataatgggaggaagtcttttattttcaggattatttggtaccctgggacaaagaaaaattcctaactgggtgacatgtcagtcaagggaaaactaaattaaatgaacagctttccacatgccttgaacattattcagaagacccagctttatttttagatcctatgataagtgtcagttatattgtttctaaaattttagttaaaaatgaagcccttcccttgttagaaacaacaagagactgttccagatgtgaggctccagatggagggttttgtgtaggccagttaactactcgcatgctgaaacaatgtgtccaggttgcctacagaccaacggcctcagtctttccatcaccaccgtctgggtcttttacccttaaagtatggttcataaatcaaatatcagtacaattttgcatacaatgtggagggtactaactcattctggtaaatgagctgagaccccattttcagatccacaacaggaaaagagagagaagcattatcattctcggggaaaaatgaaatagagttttctctttcattgttgctaatgcatctgctaaagccatcacaggggccattcatttgtgattctagcatgcagagctggaaaagccaattatccaaacaaacgagtggtgaaaagaatgacgtaaataagttttagagtgatgtcctttcccataactcttttttatttgaattacagttgttttatttctacaagttgagctgaggcaaaggtctggtgacaccattactgtgacaaggttaattttaccaaggctctcactgcagactccggggctcaactggtcatttagttgacagggaattggcagagccaactaagataataatttctgcttatcatgtgtaagtgggttccgaattcaaacactattacacgagagaaatcgcttctcagcataatgtttcttttgtcattaaaagcattgtactctccagcactggggccttcatgttaggttagggacagtagccaatagccttggcaatagtttgcaatgtttggatgaaggggagagggtggtctagaggcccccgttggccaatgactcaacaatatgtgacccattcttggcactgaagattttactaggtggcatgaaatctatatttggcgcattgtctcacccaatatatgatgatcccacttaaattcatctctctctctctctcttgctctctctctctctctctctctctctctctctctctctctcatatacacacacacacacacacacacacatacacacacacacacacacacacacacacacacagaggaggggggcttctacaatagtagatttccttatggctttttaaatgtctttagtgctagttatccttcctatattcccactctatcctgtgctctcacctttccctatcaatttaatcctcataacctagctttcctctacatcttcatctcttatcattgtgctctaaagattccctcctaccccaccccccacccagactccgccaccctttccttgctaccaacccctgtggttattctgatgaagcacacttacctaaagcttgagaactaacaaaccatataaggaaaggaagcgccatatttttctttaggggcctgggctgtctcactccaggtgattacttaccagttccacctgtgtacctgcaaacttcagaatatccttcataaccactaagcaatattctgatgtgtaaaggtgccacatcttaattttctattcgccagctggaggacatccagggtatctccaatgtctacctatgatgaagagaagagcaatgaacatgaaagagcaagtggcgatgtggtagccagagagtcctctaggtagagatgtgatcatgcaggtatagcttggcatatcagttccagcgttttgaggcgtctccatgctgactggcttccactggagctgtagaagtttgcattcctgcaagtagtgagtaaggttccccttttcctgcatcctcaccagcatctctcatcatttgttttgttgattgaggcctctctgaccttgaatggggaatgggatagaaccttgaggtagctctaagttttatttgctaaaatgtgaacagtcttgattgtttctcaagtcattcttggtttcatcttttaagaacactgtttagttctgtatcccattgcaattggtacttgctgggaagggaagaattggttttccacgggagagtgaaactaagtttatcaaccgcactcaggggcagtcctccagcttatctctgtgtgctttttgttttgttttagtattttttgtcttgctgggttgttctttgtttgttttggccttttttactttttgttttatatttttattttgagagagagagggggggataggaagctgttgagatagggaagcagagaggatctacaaggacttgggagaggagaacaaatatgaaaatatatggcatgtaaaaagtttttaaacaaaaaagtttaaattcgggggttggagagacagctcagtgattaagagtactgactgctcttccggaggtcctgagttcaaatcccaacaaccacatggtagctcacaaccatctgtaatgagatctgacaccctcttctggagtgtctgaagacagtaacaatgtacttacatataataaataaataaatcttttaaaaacaacaacatgtatttttaaaagtttaaatgcattttattcttccatctgatgtatatagtattggggattatcttttaaaaatattggtaagcaaagcagatgtggatgcttggagtcaaccatcaggctgaactgggggaacctggtgggggacctggcagaaggactggaggggggcggggggattgcaaccccattggaagcctgaccacccaattctcccagagactagaccaccaaccagggagtgtacctggacggatctatggctccagatacataaacagcagaggatggccttgcccaacagtgacaggaaggaggcccttggtcctggggaggtttgatgccccagactagggggatgctggagtggtgtggcaggagagtatggatgggttggggagtgctatcatacaggcaaaagggagggaagaaggcagatgtaggataggacaatggtggaggggtaagtgggaagtaggatatcatggaatatggggttgttggagagagtaactgggaagtgagatatcatttgagatgtaaatgaatggaatgattaataataataaaaaatattagtaatcgtgttgaagaacttttcagaagaaaaaacacttttgtctgtacttgaaagtatgatatagaaaatgcaagggtgagcctggggctacagtccagtgggtaaccctcacaaatgtgacaatggaagttagcatccccagaacctacataaagccctgtgattgtaccagtatgcaatcttagtggtactatactaagatggaaagcagagacatgaaaattcccagaaacttacaggccagctagcctagggtacacagacagaagtcaatgttgggtgttttcgtcagccactctctagcttatcttttgagacatggtcagttgctcactgaacccggtattcaccctcggctagagcagctggccagggatctgcttgtctctagcatcacttccccaatgccatgtatgcacaaggattagagagccatgcatatatcccctggcgaattttatacgggtactaggattgcacttgggttcttatgcttgtgggacagtgttttccccactgagctgtctccctgccatgtagactctttcttaaaggcaaagacaaattgtgagacaagaggttttagattggagctagagagatggctcagcagttaagagcactggctatttttccataggtcctaagttcgattcccagcaatcacatggtagctcactacctataatgtgatctgatgccctcttctgggattcaggtagacatgcagatagagtacatacattaaataaataaataaataaataaataaataaataagcaagcaagcaagcaagcaaataaaaaatcctttttaaaaatcactaggaaaatgaaaagttatatgttgtagatgatattcaccctaaagaatctgagaacacaaatttcacccttttaatagtctttgaggatgaatctagggtgaatcttttgctgaaattgcatagtacctagttacctactagactattcgttgactataagccattagaaactgttaagctatgagaacgtgaatgtatccatagacacatttgattttcctaagcttaactagagagcaatgccttgtcaacactatctctgactgaagaatgttatcaaggagcatgaagcatgacaaatgaatatttagcctttgagtttggagtggatagaggataaaaattcacaggctgcctattcatccccccccccacacacacacacactactccccacaccctctgaattccactcctagccatgatcacattttacatgaagacataacttgtcctctttaaacgatcccctgcattttaaaatctcactaaggtaactaatgtcattctggggcaggctctatcatcattttatatatacaaaaggatcacctttaaccagatgtggtggcatccaagcatctgcctttaatcccaagagtataggggctgaggcagcagtataagtttggcgccagccttggtcacacgagtttccatccagtctgtataacaaaacaaaggctgtaaaaataaatcataatgcctcaccctctgcagcaaacacatggattaacaacaggtaacaaaacatgttttcttcatatggtgcctcatacttttgatagctaaagtagaggaacacggcaagcaagtaccataggtgcttgaagaacttacctagctttgatatagtgctggcctctcatgttcttcattccttttgcagtggtagatttgcataccgagaaaatgagcagagggaaatggaatctatattcacaccgtggtgctatgagtatatcattttgcaaaggatgtctccagatcattttgatgttggacttaataatcaaaacggaatgttttgttgttgttgttgtttgtttgtttgtttgtttgttttgggttctgttgttgttgctgctgctgctgttgtttctttgtttacacaatcataagcactagctgatttcttgtcagttcggaagtgacaatggcatttggcatgtgctctcttaggctcccatgcttgtatctgttgaatggaattgctaacttagtgcgtccatcagcttgcacaggagagagtaaagctagcttatctctattcatcatgtgctgtgctggacatgctgtctgtaaggctggtccttgcagatttcgaaatctctttagaggacttttccagaagattacatctgacctcatccctcacacccatcctgtaacataatcacacgtcacacaccatctaccaccactcccagaatcctggatgtagactgggatttcttagccaacagatcaagaccaagcatggacctcaaacttatcagagcctgccatttcccagagaacgctgctattgcctgtagccagtacgcttgtcaccaagtcttcatcaagttctcagagctctctcagaaaattcttgtttagaatttgactcaccccaaattacctaccctcctcctttagactttcctgtggtctttgcttactcacctcaagtttgggaaacctgagtagccatttggctttatgtaacctctaccttcatctcttaaattatatttatttctcctccacaattcaaaccttcctttccaacttaattcatctcaccagccagcgcaatgctcattagagtccaggcctcctaagtctcttatatgataattcttctctcatacaccagccacacagctcagtatcatcatactgtcatgctgcaaaatcattttgtttccaaaaccctaactcagacatcctgctctctcagtcaattaaaggggctcatatttcatattggcattctgatcatgttctcatagaattaagggttgactgaatgaaactaatctatcttttattttagaaaaaaaaaaatcagcatggagatggtggacttctactaggagttctttggtacccagtgtgtactcttgtcgcagcagcacattctaccaaaattcagaagtgaaagaaggtgccaccttgatatggacatgcaagtttctaatgcatcaaccctgttttcataatatttacatcttagaaattatcactcaatctacttaatgacttgtggatcctacatatatcatctataagtattctatagaagcaatggaaatctgtaattatgaaaaagaatgaccatcatcttgtacttatgaaagagaataactctctgcattaatttaggcaaaatgcaaacgtagaggcagggctgctggcattgatattttgattctagtatgaagtatcaaagatagttttaatcttgactcattttccagtttctccatactttggtcccaatgtcttccttcttgaggagtccatgctgtcctgagcttccatgtggaatccaggagtaagttctagatctgccagaatccagcataagctgtctttgcaaagatactgaacatatacctaggggtctatgcaagctcaggagttttagtttgaacaacggtcatgaatggtatgagctgatctcacctttaaaccatttgattttcagactcacagtttcccctggtagaccagtgttcttttctagcagtaaaattcacagagcagggaagcaactgtccttctttagacctcactgtgctttgaagttgagatttaggactgtaagtctctctgtatgaattactctaattgacaccattcatattggccatgtattttgtaatttacctcaccttgtcaactctacagggctggtttgccgttgagaataactagcaagaagcctttgccttcctcttataccgtgtttggcaagatttcactatcatcttaagccatagcacagctctgagaatgtagaatatgtgctactgagagatttagaataaaatataagtgcaagttctgcctttggcacttaagatgtgatcaaggtcaagttatacaacctcacaaaggcttggattctcctgtgttttaaaagagtatgatatttgcaattctactatatacaagttgttagactgaaaccatgcttataaaatctttgacagtgagcctggtgctgatgatacatttagtataagttgttgttgttgttgttgttgttgttgttgttggaaacaagccagcccatcaaggaatattgccttgagccaccacacctgggtttcagtgatgttgttcatctcgtttgcttacttctataatcagtatggcaatccctctggcctcctgttgaccattttatctgtccacttacattttattgcttgtgcaagttttccttccagtaagcccagaagtgctatttctctactctagtattttgatggcaagaaactataattctctaaaatacctcttctaaacctactccataaaaaaaaagaattatttttgtctcatattttctcatatcccgaaagtattcgtttctccttttggaggtgatgggactggagagagcatcttgtcttgttgctcagggtatcccacacctcactgtacagaccaggcaatcctcaaagtttagtcctacttcccctttagagtgttggtgttagaagaatgcaggcacactcccgcacctcaggcattctccctttatcaagttataaagactcccatttttagtacgttggaccttcttattgttgcagaaggaactccctgtaggcacagcttcagtgtctagccatgtgtgccctaactgaattatgctacagaagtgttacctaaccattgaaaagatgagtgaacaaaatttgattttgaaggattgttgagaaggtctgtttcaattctttttttttttttttttttttttttttttttttttttttttttttttgggtttttcaagacagggtttctctttatagctctggctgtcctggaactcactttgtagaccaggctggtctcgaactcagaaatccacctgcctctgcctcccgagtgctgggattaaaggcgtgtgccaccacacccggccgggtctgtttcatttctatagctagaagttaaagagggtatttccaactgtcctccctagaataagcagttcttgtgtccccatcccacttcagaatactttactatctatacataataagaaaatggactccttgatgagggttagtaaatttgattgatttttatttctctccaatttctttatttcttgtccagtgcataatgacttagttaggtttttactgctgtgaacagacaccacaaccgaggcaactcttataaggacaacatttaattggggctggtttacaggttcagaggttcaatccattatcatcaaggtgggaacatagcaacatccaggcaggcatggtgcaggaggaactgagagttctacatcttcatctgagggctgctagtggaagactgacttcctggcaactaggatgagggtcttagagcccacacccagtctccagtctctcaaacatctactagatgctccacttttttaaaagtcaaagctgcagacctcattttatgagatggtgaatgaaaaatgagttgaaaatgattagatctcttttttccgaggttgagttattgatttaaaaataattaattttgaaaactcaaagtttattttccagcatttcattttgaggtgtatatctgttcatttgaggagcaaagaagttacagaaagctcaaaatgcattaatccagtcagatccacggtggccaggagagaaacagctaataaatgttctgaaaaaccagctgggaggccttcctctctgctgctccttttccagtccaattacaggtgaaaagatgctatctatcagcgtgtcgtttaaattcaaatatagaaaaggtctgtcgattctctttcatgggcttcttgccaagatgagagagttgcccactgagagctatattgatgttttcactgaagctcacggtactgataaacagtgaacacgtgtcagggaactgaataacattggagcccggtaatgttaaaactgagaagttcaggtgtatgtcctcttatcttggaacttcaagacaaaacccacaccaaagcagaattctaaaattaacagcaaacacgatcttcccagatgttagaagaagatgcgttctagatgttcatgttccggtgaattatggagggcaccagggtgatgtctctgactttttaattaataaaggaaacacaagtacctgttaaaactacttagaaagactattaaaaacttgggatatgaaaggatacatgtgtgaaagatgtcttaatgtagacaccagcaaagtgtttctagatattgctaatagtttgggatcctttttagtgaataggtgcgtcaaaatacgccatttgttttgtggtttaaccaaacccttaagatgtaattgcagagaaacttgtttttctttcttgggggggtgggggtggggttgctgttaagctgaaggtggagccagtggaatttggggaaacagctgcggttgaaggaggactgccaaactctcacagctggctgcagaaacattgattataaagatagcgggcaagtaatccagataattatatgtgttaagtaatttacataattgggcatatatacaaatggatttcttcactgagttattgttttaacaggaaaaaaatgaatctactagtggtagactatttgatcaagagcttaagtgttaataaaccaaaaaaaaaaaaaaatgcaggtgttcttggactagggatgtagcttgacgatgcttgcttagcacacatgaagccctcagtttgtattcacacacacatacacagagagaaagaggggggagagggagagaaaaagagagagagacggggaggggggagaaccagaatgtgagcttttaaaagtttctttattagatattttatttacgtttcaaatattatcctctttcctggtttcccccccccccgaaagccccctatcccctccttagatactccatttccagttatgactgagcttctccactctctctttctctctctctctccctccctccctctccgtctgtgtgtgtgtgttcctcttacttacactctatgcttagcctaatcctttgttacatactttctttgggaccactctatgaacaacagcacaagaacacctggctaagtaaatactcagtgtgaagggtgacaagtgttacatgtgacttctctcagtaccacatttatttacgcagcatgtcttgcctcctctccaagccttcgcctaggaatctttcccaaagaagtcctccacttcaacagccgcctggatgaatcacagctagcacttacaaagaagcctgttggcctactcttttttagacatcacttatgtttagtccacatggaacagtgctgtatccctaggactggtgagatggaaccttctcttctgctcggatctgaactgcatcactgcctcagtctccaagttgtatatgggagatgttggatgagggttaggtcagtgcctttgaccctttaaacgacccttggtcagatctacccatccacacatgccagctagtgaagagagatttgaacaagccacaagttaaagcgatgcagaggagaggaggggagaggctgaaggagaatctccaaggtgacccccaaactcttcaaaatgtattatcaaaatcatctttttctagtactaccttggtcatctttggttttgtttagttaggtacccaaccctaacttcctcgagtccttgcctcttttaaagaggaaaatcatgttcctatggctggacttggcagatctacttttatagtttcaagtttccctgtcagtatcttcacagttactcaagtgctaggttctctccccctttcccctgcacttatgaattgcactagatttaaaaacaaacaaaaacaaagcaaaagaaaaaacttgtcactgtgttttctttttctttggatggaaataatttttatgaattactttgctttaaccactttttatttcctttccttaagccctgttctatcaaaaacatttatattttctattaggcacatcatttcccctaatctgtataagtgttatgtgaagataataagctaataaaggcaataaaacctcaatttcctgtcttagtacaagtggaaatgacctgacataatttgaagagtatgattttttttattttaattcgttttcttcatgtggatcatttcaatagcaccttttgtgatattatttttcagccacactatttcaaacaagaaattagatgctttttgtgaagattaagttcaggttgagcctcttaaatgcccagctgccgtccgtggtctttttctccactgctcctcatggcattcagcggactctctcctaatgagacttccactggacctcgtctgactcccacttctgtctctgagcttccttctaagtccttttttcctaatgagcattttctgtctttcaattaacatgtttatgctgaggagtaaaatggagtaagaatcagacaaaatgtgaactgtgtaaacagacattggatggcttagttagtcaccaaggtgccgtgtgtgtgtgtgtgtgtgtgtgtgtgtgtgtgtgtgtgtgtgtgtgtatgtgtgtgtgtgtgtgtgtgtgtggcctcgaaagttaaatgtgggaatgataatcttgaaggtgaatttcatcatctgtgaagaggtagacatatttctgaaatgcagtgacatttaacacgtctgtgtttctacaatggaatacttctttcggatagtaaagttattctgtggttttcagaagttggatagttgaatggattggtgacttgctcagtttaagttgtgcttcactcaatctacaggattgctgtctgcctttaatgaagcaggctacttgctgttctcccattttaattgcaatggtccactctgctttatatctttacacttttactgtgtgtgtgtgtgtgtgtgtgtgtgtgtgtgtgtgtgtgtgtgtgtgtgacttgtctgtctggcagaaactgaaccttaacagcaagaacaaaaataaatggtgcatggggggttgaaggggaggctaaaaatcaagttatatatactatcaaaacccttttatcgaaccttaacctcaaattcaaatctggtaatttattttatgcctaaattgggaattagccatgtccaaaaatcaaaatcaatctctctctctctctctctctctgtttgtatgtgcactcacacacacgcatatgcacacatgtgtgtatgggtgcttgcttgtctggttggactcaagtccattagttactatccttgctgtcagtgacattcctagagaccgtccctgtgctggggaggatgtttgaacgtgtcaatggaagaacactgagagcctctctaagtctaatagtcagacaatggcctcattgtctatctctgtttggcactaattgataacagcttttcttgataggagtctaatcttccttttctattaaaaataaagagccttgttattcccacttcccagttattgcttctaggcctgtgattgccttcctggcaaatattgtacaaagaaattgatatgtatgattctgccaaaacgagacttccatgtgataggcaagactcaaaactaggctctttgatatttaatacttttcaaatatccacaatttctaacgctgactgtatttctggctttcaagattagtatgcacgtgagtgagattaattttgcataaatatagctcatgtatataaattggaagttttcaaagaaaagctatacacatacattgtacacataatatttgcatgggtctatgcagtaagctttgaaaaagctcaccactttttaaaaaaaaaatgtgtatagtgcagaaactgagagtggataataggctaatcattctaaatgtgcatgttattataaatcatatattattgacttttagattatatattacatatcatgtattgtgtttgatgtttcatataacatttatcatatcatatattgtatataatgtaccatgtgtcacatattatttatcatataatatagtatgtagtatataatatatagaatatagtacatgttattatatactatacattatatattatgtatcatatagcatatatatcacatgttttatatgttgcatatcatgtatcacatatatatcatatatcacacatattacatatcacatatcatatattataaattataatatgttataggttgtatatcttatgttacatattaattattatttgcaactatgaattattaattatgttatggcatatattctattttgttgtatattaaatatatacatatagtgtatatgtatacatatacatctcctgggtttccatgagtgagtactctatttgggagagatacatgcttagaaaatattagttcggttgccttgttctatttattttatttttaatatcagacaaaaaagttatcccttcccttgggagaattctatacatttagagaggactaatttaattgactaacaaaagagtaagaattttgtactcattggcttaggccctccagatgaataaagctgtagcagaaatgatgtgcacagtgtggaggcgatgtgcacagtgcagaggtgatgtgcacagtgtggaggcgacatgcacagggcagaaatgatgtgcacagtgcagaggtgatgtgcacagggcagaaatgatgtgcacagtacatgttagtttttgttttcttgctctcctccccaacaatgagctctgaacaggagacaggctctctctgtccccactaatgctctcagatgagaaagcaaaagctccaagttactgcataaaaaaaaaccaaataaacaaaggaaaactgtatgctgtgtcatgtcctcttttggctgctgtgtttcagtattaagaattgaaagcactgggaaaacctgatttttgactctgacctgagatggtgatgtttatgaatttgaattgtcagaatctcaggaaataataaactttaaccccaaactatacttgtttcattttctaggacagaggcctaacaggtaaaccatctttaatgttatcaggtggcccagaacctaccaagttactgtggtccttgagggtgtaggtgacatgatagagctaaacacaggcatattgtagcagtgttatgtctatggctatcacctcatctcccagtagaaccccaggtctgcgtgttacctggaagctccctatacctagatacagtgtcaccagcagagatagcatgtcacattcttctcactgctgtttgtaagctgagagttatgggaaggtgaacttgagctcattctcccagagcctggataagcagagtttagcttctgcttatgatctccagctcagatttatcaacagccaagatggcactgggttattttttccatggttttgttttgttttgttttttgttttttgttttttgtcacttatggagagctttgcagagcacatcactcttgtccctttctatgttcgggacagtcaatgacatagagttgaccttggcttggatgtcaaactttttcatcttgctagtcagaggactgcttatctccctccctatgacatgagaactatctctgaccattcctcttctttcacctcaacttctgcctctgtttctatccttaacctctaccctgtcctctttcatcactgaagatgctggggttttttctccaatgtacatttttgtcaaaagccaggtacagtagttgctttgacttttatctgggtcctcctttttattctatagatctggatgtctgtttttgtctgagtgccattctgattctattactattgtattgaaaacataatgtaacatcagatatgctaatgtctctagcagtattcattctgttcagagttgccttagctacccttcatcttctgtgcttccatataaattttaaggttgttttttcctcctgtctgtgatgaatggtgtgagaattatgaagggaactgcactacacttgtggattgtttttggtaggattgccattttcacagtattaattcccccatccaagagcatgagaggccttttcatgttctagtatctttcttattttcctcaatttcttcactgtcttgaagttccttctctctgtaatgaagtctttcgttttctcattacgtttattcacagattcttttgttttccatgtgtgtgcgtgcatggatgcatttgtttatgtgtctgtgcctgcatgtgtgtgtgtgtgcgtgtgcgtgtgcgtgtgtgtgtgcatgtgtgtgtgtgtgtgtgtgtgtgtgtgtgtgatgaatacactccttttcttaatttctttttcatttgcttgctattgttatctatgagaagtactgatttgtaagggttagtttcgtatcttgctactttgatgaaagtatcagctctaggggttttctgacagattcttttggggttcttaggtatagaatcctatcatcagcaagctaggatttcttaactcttgctcttttatttgtatctttttttcttgttttattgatctagctaaaacttcgagcagtgtactgaatatacatggagaaagtagacactttagttgctgattttagtggaaatagtttgagttttttctctgtttattatgataatgactgtttgtgatatattgcatttattatattaagctatgctttatctctagtcaatataaagcttttatcagggaaggatgttcggtttttcaaagacatttttggcaacagttgagttaatcatgtgatttctgtcttttggtctacttaggtgatgaatcacatttattgacttatgtatatcgaaccattcctgcttatctgggttaaaccaatttgaatgtgataaagacattttgctgtttggtctttgatttagtttgataattttgacactatattaattagagagagtagtggataatctttttctctgtgtctttatcagatttttggtatcagcataatgattactttttaataaggttttaacagtgttccttcttttaatttttatgggataatttgaaaagtattggtattagttctcctttgaagatctggtataaattctactggaatctggtccttgggttttttttaagttaggagattttactttattgctgctttaattgcctttttgtaaatctgctactatcatttgcaccatcttgtttgattttggaaggtcatatacaactagaaatttgttcatttcttttagattttccagtttggaggacaacagtttttgggtttttttgttttgttttgttttttgtttttaagtatagacctctggttttataagtttcattagtatgtcacaatatctccttttctgcctctaggtttactgagttttctctcactttgttttggtgactttgactatagatttgccaatcttttttctttatcctttcaatgaaccattgttattggtcctttgtattgtttttttaattgattgtttctattcaatagtttctgggttttttccctgattatttcttcctgtctacttcatttatattttatttattcttgattatttagtgcttataggtacatcatctgagttctctgatttctttcatttcatttagacccttacagctataaactttattcataggacaacctccattgtataccataggtttggatatgttatattttcattttcacccagttctgtgaattgctttacttccttctttattccttcagtgatcatttactggtttatcatttaatttccatgattctctgtagttttacttgttggtttccagctttactccattgtgatcaaatagaatgcaagaggttagataaattaccctatatttattcaggctggctttgttgccaaatatgcgacttattttagaaaatgtttaatggttttctgacagaacatgtgtatttggtggaatataatggagttgtcttttatggcttccaacactctccaatgttctcttcatatatatttgaatgtatatgtatatatatgtgtatatatgtatatatatttgatatatacaattgattctgcctataaagtcccattcctctaatatgggttcaaggcctgaaattctgtcttatacatgattttattctattgatgaggtattaattgattgattaacattttcacttccaccatcattttgattaggcttttcttctgtatttctatttctttattgcattatattttttatatgtttaactgattttcttatttcatccatgtgattgtgtgtattctcttgtaaactatacattacctattttaattctttgaacatatttataatcattattttaaattaactgtaagttcatctaaagcctcctcattgggagccgtttctgtgggcttggtggtttgagaaggaaacgtgcagtcctggtttttcatgttccttttgtttctgcattagaattcgcacatgtgagatgaatttgttgatgggtacttctctttgtaattcgggtcatcttttttcttacagtggaagtccattcaacgtatttcccccagtggaatgttgtggctcttctgactcccagagttgttttttgtggcactttgctcagataggggcaaaaacatccttcagtggtgcagtgaaatgcgccctgtgtgttctttgacggcactgtgtgaaatgcggtgcagtgaaatgcggcctgtgtgttctttggtggcactgtgtgaaatgcggtgcagtgaaatgcggcctgtgtgttctttgacggcagggcactgtgctagctgccactgtttgtaatttaaccatgctgcagcttgtgcctgatctcacctcaccgttaggtggctttccacctctgttactgtctagtgtgggttcccacaattgtgtgtgctaacctgggtcacttttgggctggtccacatctccaccactacctggtgtagatccccatacctctgcaccatagcctgaatcactctaggccagttctcgtctccatttcctcctggtatcacttgctgtgtgtacatctatatgtattgggggggggggggaatgcatgtgccacacagcaggcatgtagaggaaaaggacaataagaccttgggggtcagttctctcttttcaccatataggatctaggaactaaactcaggtcacagggttgctaacaaatatctttaactgctaagtcttcttgttggcaccagtaaaaaactttaagactgattacatgctaaaatgctttggttttatagatcttcataagacacaccataagtaaatgaatatcttattcatttagaccttgggtcctagaagactgtgatctgacattcaactcatactcctactagtcagtccttttcttaagaaaaaatggtatagctgggtaatggtggctcatgcctttaatcttaacactcacacaggaggcagagcagggtagatttctgagtttgaggctagcctggaagagcaacctcacagaaaacaaacaaacaaacatattttgaaaaaccaaaagacagagagagaaacagagggagggtctgcccatttggaaattccgaactcacggccacatagatctgattattaactgtatcataaaataaagcaaaaggacacaacaacaaaaaagagaccagtagagaggagacagtattgataggagggagattgcagaggcctgggggttgggttaatcggaatacattatatacttatataaaaccctcaaagaacaattttaattacttaaaaatcaagttcaccaataaataaaccagttgtttcctcaaactgagaatttgctaaaaggaaaatgaatgttgatggtgtaatggcgagaatgtgagataacactagattaataacccaagcatggctttcagaactcagccgtgctgccaaagggcgagatgcaggagccagccttgtggatctctgtgggaaggaagacagtaatgctagatgagaaacagcaaaggttccaaagaatgatcatttaaaaaagagcccagtataagaaaatagcagaaatctagccagtctagtaacagtgagcctgagggagtgtggcatgaggtgaggtggtgaaggtggcccagccaggccttcaaggagacctgggaaggaaagccacaggacatttccagaacaaggacactgatgtacatcttttagaaggacctctttgtctgcttgatggaagatggaatacacatgggtaagatgagaagcaggcagaccagccagggttctagttagtgctggcaaaagatgtcaagacctgggattaaaaacagagctgatcctaaaatgtgcatagtacttgctataagcttgatcctccacctcttacaatcttgtaaatggtttgggggagagaggagagaggagagagcgagagggagaggaagagagagaagaggggagggcannnnnnnnnnnnnnnnnnnngagagaggaagagagagaggaagagaggagggaggggacaggggacaggagagagagagagagagagagagagagagagagagattgtgttctttctaatttttgcttgaggcatctggatttgggggtggcagaagaaccaatgttaagatataaagttctattgaaacttgttaggtattttaagcctatggttctatgatttgacgaagaaaccagggaaagaaatctaagtctgggagatagcttaatcttgtgaaatagggtcaggaaggtacaaagacttctcctgtggagagatgggctgggagactgctcatctcatgggaaggagacacaatccaacacagggatgatctggctgaaactcttctagaagcttctttctctctctacattcttgggggcttttgggttttgttttgtttttttgtttgtttgtttgtttttgtttgtttgtttgtttgttttgtttttgcaagcagtaaaagaaaacataaaagcatcattgctagtgttttgttttttttttaaggaattatacccaggaaatcataaaatacagggaaaattgcttcatcaacccttggctgcagcctacaaattagagaatcacacaggaaggcattaaacagggatgtgagagatatgagtttgattttattagtcttagctgagagatgaactttgttttgaaagctccaagaacctctgaggcccaagttgcaaagcagtgtagtaacacaacatagaccagtggagcatcagccaaccatggagagagtgggaggggccacagcttgacagccagtaaaggtagcacactgtgttacaaatgtttgagtcctaaagatggtggtctgtacctaatttaaactacatagtccgattatatatttaataaaatgtaacatatttttatatattatataattctattagaatgtcactcttttctttattcatttgttccctttttatttactttggagttatccagattgaaaaaaaaaattcacccaggcatggtggcacatgcctttaatccagcacttgggaggcagaggcaggcgaatttctgaattcaaggccagcctgatctacagagtgagctccaggacagccagggctacacagagaaaccctgtctcaaaaaaacaaaaacaaacaaacaaacaaacaaaaattcactaacaataggatggaaataaatggtgcagtggtgtaatcaacaaacttaattaatacaattatatatatatatatatatatatatatatatatatatatatatatacacacacacacacaattaagctacctgtgttttaaatgtattattaaattcctgtattcatcttatatgtatggatattttgcctgcctttatgtctcttcatggtgcctgtagaggccagaaaagagggtattggtgcccctagaactagagttaagatggctgtaatccaccatgtgggtgctgggaattgaactcgggtctagaggaagagcagccagtattcttaactacacagtcatcttaccagccctaggtacctaagttttttgtttttgatttgtttgtttgtttgttgttttgtttttgtttttcgagacaggatttctctgtgtagtcctggctgtcctggaactcactctgtagaccagtctggccttgaactcataaatctgcctgcctctgcctcccaagtgctgggattaaaggtgtgcgccaccactgcccagtggtacctaagtttgtttttttttttttaatattttttattacgtattttcctcaattacatttccaatgctatcccaaaagtccccaataacctgccccccacttccctacccacccattcccttttttttttttttttttttttttttttttttttggccctggagttcccctgtactggggcatataaagtttgtgtgtccaatgggcctctctttccagtgatggccgactaggccatcttttgatacatatgcagctagagtccagagctccgaggtactggttagttcataatgttgttccacctatagggttgcagatccctttagctccttgggaactttctctagctcctccattgggagccctgtgatccatccaatagctgactgtgagcatccacttctgtgtttgctacgacccagcatagccacaaaagacagctatatcagggnnnnnnnnnnnnnnnnnnnnttttaaagtgagaaaatttaagtaaataagcgatggttgatccaaaatggaatttatcttttataacatcaccgcctaactatctgatatgagtgtaaccacataacttcttaaattttgtacattttgtgttaaattccaaatgctaaaaattggatgctatgcaaaagaataaaatttaaagattcttgggatatttataaattactataagcttgttatgttatgagtttagctacccctcactacaatctcgtatacaagcttgaacttaatatttcaacagtaattttatacccccaaataaggtagttatgtatattttgagaattagatagcatcacaagcctattgagattttttttcttaacaaaataaataaaaatgttccattaaactcttttctaaaaattcctatcaaaggagggaatgagttatccactggcacgcctgagtgtcagctggacccatgatgactttgtaggaaacagaggagacccatctgaaagtgggtgacaggattctgatggtttgctactcaaatctggaattgcttgtgacaagctacgtctgattttcttcagcatttagcatccaggattttctttatctaaccttcaagagtaggtcaggaactgagaagaggggtcaggagctgggagaggatcctgttatctgaactgacctctctctcctcctctccacaagctgcgaggtgagcatccatacacctagcacaggggatcttacgaactgtcacaagaacacgtgagaaacaggaggaggcagagggcagaaatcgacggtacgcaggagaacaaataaattcatctcaaccatttaagaagcaggaaggtgaagacaaggaaatacagttataacagagaagaagtttaagtattagttgattgtcaaaactcatcaccttcctcaccataatttagagtaggcagattgtgtgtgtgtgtgtgtgtgtgtgtgtgtgtgtgtgtgtgtgtgtgtgtgtgtgaaagagagagagatacagagacagacagacagacagacagagacaatatatgtgtgtgcaaaagagagatatacagagacagagacagacagacagacagaaagtcagacagagacaatgtgtgtgtgtgtgtgtgtgtgtgtgtgtgtgtgtgtgtgtgtgtgtgtgtgtgtgacaggccatgactgttcaaggtcaaatgactagtggaggtataactcctctggaaacaactccttgtgttctacaagcagcgcttgtagagatgaatgcagagatgctgatgataattccacagtctttccaaagcacccctgtaatctccatgcaaaatgcctcatagagagaagaatgtattctactgcccttctaatttgaatcatctgcctcagaactttctcactccttgtcctgctgccgtctgtactcacgcccttaatttcataacttcatcggccaaaggcattaggttccctgaaagccaagggaatattggaccacctgatgtgggtgctgagaactgagctcacatcctctgcaaatgtggggtgtgctcttgaccactgaacatctctgtagacctgcttctagacatcctagtactccacatttcatattttagttccctttctcctttagatttttatttgactcaccatgaaatcatgagtgagaaagattttgtacagtcatgcctggtgcctaccatcaaattttccccaaagaaattatgagtagaccacctgatttccagaaaacaatactaaaaacaagaactcggctaacactggaatcacacccttgtttgtgagtcacaggcctattgacacacagtatgggaagtgtgtgatcttgatgacgattttagagtgaggttttcagggagaatgagagaagaaaaaccaaagtccatgtaaactagctccggggcccttgggaaggaagcacaggtaaacctctcagccggatgcctggcagccacttctgaccacacgtgcatggagaagcagcagcaatcagaaagaagccacatgcatgagtgctggtttaagagagctgcagcctggcatgggtaacatgacagcactctgctttatccatgaaagtaagacagagatggaaacatttgtcagagttgttttctctttctcctcagaatactcaaactgctcgtaatatattatttatagatttatcaatgtgtagcaagggaagatccacaggagtagtatcacagaaaccagccctttccccagtatccaggcagtggagccccatagcaaactgccaggggtcctcacatcttccccctggtcggttcttgtcagttttacttcactcatttcccttcttccttttctctttcctctccatcatctcttcccccaaccccagtgacatctagcgaatggctgcatcctgctagcagctgttggtgttaggaaggtaacctccaggtgacccgagagccaggacagtatccgtgaggtcactgctgctctgctactcagaggcaggaagagttaatccaatcaggaaagagcctttgtcaccacgggtcggtcggaggggaggcagttcatagcgtggaagctttggtcggtgatggagcactgaaacaggagctaagtttatgcctcagggacattcctaaccaagaagctcagggagagtgccaccactcacatttctagcatcctgtctgtggctttccggtgaccatagtagtagggtgctcacgatggtagcaatgataacgtaggcttcattcctctaataactgccctgagcactgtttcaggcagtgacatgcatgctttacatagattacctcatttaagcctatcagcaaccagcaaggccgctctttttcacaagagagaatgttgggatagcaggcttcccgaagctcacacagtaatcatgtcacacatttcctccccacaatggagacttcatttccctatgtgctcaagtggagcagcctgcccagtgcccttgaaggcaagggaatactgggacaacctgactgttaagtattcttaagtctgagacggaagcatgccccctgaacagatgtcagctcagcatctctccttgaaagggtcactctggccaccctgggtcaccttggccaccctctgcatctctctgccctttatgcttccgactttttcttcagatcatgaatcgctactagactatgttatgcgtcttccggctgtcagaagaaaacagcacaaactgtgtacacattcagctgcagacatctattcacattccaggaggttggcaagtccaagatccatgccagcatggctgtgatctgatgagggttcccttcctgactagtggagagctaccttcttattgcttccatacatgaactgtgcatgtgtgtgtgtgtgtgtatatgtgtgtgtgtgtgtgtgtgtgtgtgtgtgtgtgtgtgtgtgtgtgtgtcctggcaaatgaataccccacccttatgacctcattgaaactccatcacgaatggttctggtgacagagaagggaacgtattcgaacccatgatagatcttgactcgcagccctgtgtagaaagggcatcctagggtctcttccctgtctccccccaggacagagcctatttagggtaaatgcaagtggaagtacaggctgccgtgttgtaaaatagcatcaccaatagccaacatcaacactaatattcccaagaagagcagaagaattaggatttctgtttgtaacattggataaaatgatcaatgcttctatcaacatctatttattactttttaaaatctatttatttatttattatttttagtttttaacgatgaagtctcccagtatggccttggttggctgtcttggaattcgttatgtagaccacgcaggcctcagactcagagaggtccgcctacctctacctcctaagcactgagatgacagaaatgtcttgccacacctggctagatgtctgctgtcatgttaactgcctcgttcacatggctattagtgggatggtggcttgaaccttctctgccttttctccgtcacttttttctccaagaaatgagcacaaagagaattcttatgagtggattaacaatgctacacacaaagaggcttacatataataaataaataaatcttaaaaaaaaaaaaaaaaaaagaatgctcttgaagaattcagcctcaagtataggggctggtgagatggctcagtgggtaagagcacccgactgctcttccgaaggtctggagttcaaatcccagcaaccacatggtggctcacaaccatccgtaacgagatctggcgccctcttctggagtgtctgaagacagctacagtgtacttacatataataaataaataaatcttaaaaaaaaaaaaaaaaacaaagaggctacatttgtatcaacgataaacagttgaggaaaggttagtgagttatatagttgactacaaagattaaaacaaatcccaaaactaagaattcattgtgccttctggttaagtcaacaaaggttattggttttatgaaaatctcaaatgcttagatgttttagtttgaatttgtgctctctcatatattctctttggcttggccctcaattcagcatattcacatatgagactttggggatatgattgagtcttgagggctctggcgttatctgtggtgcatactgcagtggacttacaacgtgagagagagccttgcttgaagggatggaccctttcaggagtttaccccactggaagaccactggtggccagcctttgagagtcacatcctgttctcagatcttgtctcaggatatctctttctgacatcctagagagaagtacctaccttcaccacacatactaggccagtctcttctgcctcaccttggccccacaatagtggagcccaggtaccgtagacggaaacttctgaaagcaggagctaaggcagagcctccctcctttgtttctcaggcattctgtcaacagcaacgataagctgactgagacaggaccatgcctagctgcacatcacatgcttggtaaacatttgcgctagtgggagatcttttgaggtttagcttaatgcacgtgccgcttggtcacacgcgcacgcacacacgcaggcgcacacttccaagaggctttctgtctctctctgagtgtgttcttagtgaaaggaatctaaatgttgaaggttatttttatggacttggaatatttcccaactgtctaaataaaatgaagttatttcaggtctcgttcatgaacaagtgttgagcagggcagagccgaggacagcccagactagaaaggaaaggatttatgcaagttgatgcaagttgttcttaacagccaggtggctagatacaggcctactgtgtgtcagccactcccagtgcctcttcagcctggccatgctcacagcctgccagggcctgggatgcagccgcagccaatggtctgatggtagagtcactaacaatggctgataacggcttagcaccaatgtctgctctaagtatctcatacgtaagaaaggatttaatccttatatgtatccgatcccaccattgtgcccactggagtagtgtgcaagccaaggaagagaaaggttaaaaaaacatacttcatatcacacagctcagaagtggcagaggcgactaagagcacgccaggggtagcgggagctctcgtggctcctttgtgtgctacgcggcgttggcgggaaccaacctgatcccccctagagcatcattggctcgctctcgtctgtccagtaaccacgtgctacttcagcagttgcgcagtggtttcaggcacccgtagggcggccactcagcggcaagctcttcctcactgttcttccagttccccacaccttttggagagtgtaaattcctttgttcattttggttttaagttcatgtagtcatttggatgagatttaggatgtcacctctctccactgtcctcctgctcagacactcttgtccacctgtccacccctttcagttccccgggttgcaactcaaaggagggcagcggatcttgtacttctgttgatcttcaagagattcattgtccatcactccctctgtgcttccctagtgctgagaatttccccacaggtatctgcttccttcagaaacactgctttatctgtaacatctctcacttgcgttattagttagggtctatacagaataaatggagtatgtagctaagactctaaggactattcttggctacattcgcagtcctttcttgcgaaaattattaccgtggttctcttcagcaattcttttattgctaacaaccctttcccaactctgccatggttttacgtcttcccattgatctgagcctgaggacttctcccttacactccaaactcttttcaccacactgagaactaaatctccaaacaaaagcaggctttcccacattgcacattgtggcttgtccctgtagagagccctaagcaccttgcttgaagctcaaacggaagccacgcccatcctgtggctggggacccaggccatttcctttgtttggtataactctcaactagaagcagaaaaacaaacagttgtgtcccctgccctctgagttcattcccaacaccgacattgccctccaagatcatgtccaacaccgaagtctctgggtatggtttgaatgtctctcccgttggcctcatatgtctgggtgtgactcactggaaacgacaacagacagtgacttcatccaattcctgatacacatttgaggaagcaggtacttgtggctggccagtcctggattgaagtttctttaactggaattattatttccatgtggctcactgaaaagtatcgtagatctagtgcaaaggtcaacatacctcttctctaagagggcctgatcataaacattttaagctttgggactaaggagatctctcagttggtaaagtggtttccaagcatgaagacttgaggtcaaatcctagaacccatattacaccaaacaaacctaaactggacacgtggtataggctatgcttgtaatcctggtgctgatgaggacaactagttagtcactctagcctgcataagagggagccccaggtcactgagagacccccatctcaaataacaaagtagttatgcttgaagaatgatggccatggttatgttctgacttccacatgcacatttacacatcagcaatagtaacataaacacataaaaatcagatggatggatggatggatggatggatggatggatggatggatagatagatagatagatagataataaagtgtgtgctttaaaaacacagtctccaagtctttaactggctaacttgattctttcctgagtcctgtagctttaattgctcttgttaatgagtagaactgtgtgtctagctttgtgttatcccccatgacgtttttttctcccctcgttggactgaatttcagaattttagaggcagttttcaaacatttcaactgtgcatctgctccattaggtgacctgcagtgccgccctgtggccaatgtgatgtctgcagccacagtccttggttgaaactgggattcaaccacttagattgtaaccaaatacaggttatctagaaaatccacacagtttacttttgctaagaatgggggggtcactttttgcgcactttcccaagttgctttattgaatattatatttttactccttgccctacagtcagatagtcagattttctcatcatttgtgggaagaggtacctaaaaacaatttatcaccctagaaattattacagcaaataaatctaccttttagagtaattattaagattgattctaagtttctggtaaaaaactagccaatagctgtgggtgtggggtgggagggagtctgtgtgtatatgtgtatgtgtgagtgtgtgtgtgtgtgtgtgtgtgtgtgtgtgtgtgagttggatggtaagatgtgatgagctatggaggtaaacactttagttcatctccacagttgctccctgatactaacctttatgatctatgcacacatgtgttttctatgctttgggtgggggtgggggggagagtcagtgtcttagcagtgtcttagggctgtagaaccaacatcagcaatgctcctcccattactatacaacaggactggtccattaaaaggctggcctgctgagtgacttttacccaaactctctgctgctctaaaggaggcaaaaccaaaccaaaccaaaaaccaaacaaacaaaagcaacagcaacaacaaacaagaacaaaaatcatagcggtgcatttagcaaaaaaccagtaagcaagcatcaaaacagactgtgactggaccagaagtaaatacccacgaagaatcacttaaatacagacaggtagtgcttagtaataaatcacagaccatcttaacagcaagccttacaggcgtagaaaggatagacgagttcactgttatcagaatttaggaatattacatcatgtcacagggtgaacgaactgcagcttaacccagcatgaaggtgagcaacgttcagcacttgccctctggtatttctcctgctattgcctgggagagccacttcagctgctaataagagggtgcttccggtgcctcagactgtatgagagatcacttatggggaannnnnnnnnnnnnnnnnnnncagggatcggggaaagcattctgctttccaagcctaaagtcttggaactcacccagatctaagggagtggacatctaaacgtgagaaatccttttgcaaacggctcaggagcagcgccccagtcactgcagggaggtttggttatttctgtttgtacaaatgagaactgcgtgagaaaagccccgcgccttgatgggggatacttaggaaggggccacacgggagaatccaaaccgaaacctctggggctgaggttcccgcagttctcatccggacccatggcttccctgttgccagggaagaggctggctcaggcaggcagatcatctatgggagagaagatgacgctcactgtgcctgaggtcaggacagccgattgctttttggatagcctggacttctgcggcaacatttgtgccacaggaaacagtgccgtttcccttgaggccaagttccccttagctctgtcggtgaccttcactatccatggcttaccattctccaaatccctcctaactaccccccactgcctctttcttgccaccttctttcccaattatgcgtttggggaaagaggccctcttaccaagtgaatccgttgccacagacattaacacagcctcaggtatttaaggtcaatacgcaccaaaaatgttcccacgtttcactgaccaagaccatgcatcaaccttgaccaaaatgcaggttaagttggggaggttagagggcagagtaaccaggagaatgggggaaagtcctctgtggatctgatgtggtgacacgggggctgaccgataaggaagacgacaccaacaggattcaaactaatggaatccaatcagtgggcactgactccaggtgacgattcttgagagctgagttagagctgaggcactccgacaggctttcatttgctagatagttgccactttcgtgctcgaacataaaaaccaaccgtcattttacagtttggcaatgtttgacctgcgttagtttagtagtaacacccaaaggataaataagcaacaaagagtgggaacacttctgctctacaccccatgtcatggctactagcagcagcacacgccactgaatgtcactgattgggaactctggaaaaggctgtaaacgtccccacctacccaccacccacccacccaacccactgaaagcatttttatgttagcccttgaacgccaaaaagaaaaataaataataaaataaatttaaaagcgtcgctttaatgtttctaaggcttgagcgacacctagtggtagtctacaagattgctaaagcactgtaatagggtttggctaacttttttcgttgtttttcttttattctctcatatattccaccccagctgtagtnnnnnnnnnnnnnnnnnnnnnnnnnnnnnnnnnnnnnnnnnnnnnnnnnnnnnnnnnnnnnnnnnnnnnnnnnnnnnnnnnnnnnnnnnnnnnnnnnnnnnnnnnnnnnnnnnnnnnnnnnnnnnnnnnnnnnnnnnnnnnnnnnnnnnnnnnnnnnnnnnnnnnnnnnnnnnnnnnnnnnnnnnnnnnnnnnnnnnnnnnnnnnnnnnnnnnnnnnnnnnnnnnnnnnnnnnnnnnnnnnnnnnnnnnnnnnnnnnnnnnnnnnnnnnnnnnnnnnnnnnnnnnnnnnnnnnnnnnnnnnnnnnnnnnnnnnnnnnnnnnnnnnnnnnnnnnnnnnnnnnngagagagggttggatgatgcaacccagtaggaagagggtcccacaagcaggcaaaaaagtcagagacagcccatgttcccattgttaggaatcccacaagaacaccaggctactcagctataacatatgcagctgaccgaggtcagacctctgcagactccctgattcctgtgagtcctggtcagggctatattcttgcggtgtccctgacccctctggttcctccaatccttcctcccactcctcctcaggactacctcatgtttggctgtgggattctgcatcttctcccatcagttgctgatgaagtctctctgatgacaattttaaagcctatgagtagaaactacaggggggaaatgacaggtaaattgggcacagatggactattctcagcctggagcttgcaactcaagagcattcacgtatcattcacatatcaaaatttctctatataagacatttacatcactattcatagcactagcaaaattacagtgatcaagtggcaacaaaataattttatggccgggcagtgatggtgcatgcctttaattccagcacttgggaggcagaggcaggtggatctctgagttcgaggccagcctggtctacagagtgagttccaggacagacagggctacacagagaaaccctgtctcgaaaaaaaaaatatggtcagggtttaccacgacaagaggcagtgtatttaaagtttggggcattaggaaggctcagaaccactgcaatacaccatctgtttgcacagcacttgtattaagcatcgtggatatatagagatgattgaaagaatatggacagattgcagagattctatgcaaacactgtgccatgctcatctgaggtctatgagggacagctctggcttgagggacatgtactccttagttctttgagtcagcctttcgggagagctaaaagctgcccctgccttaacagtggaaaatgctatatagcacacagctacaggtaactggttaaacatgagacttgtgaacactctgtccactgtgcatgtcagcatttaccaagcaagtaggaaattaacaaccaacgattactagattggctttttaagttcttcactacaaaaagcgataactttgtatttattgcttagaaacactacactaaagagctccaacatacatgtcatatactagttccttgatgggatcaacactaattttgaaaatgccagtgctctgtgggaaagttctaaaataagaataacattgacaagtgtctccctcattcaactatctctaagcccttcccttgccagcagtgggtgacatcatcagccacagccaactttatagcttggagacacaagtaagtctccgcacttgagttttaagcatttaatttctggctggaacaaagaatgcacacatccattttctgaattacagggtgtaggctagacatgctattgtctccaggatgccctcccccaatggaagcaagaggattctcccagcaaaggagaggacgggagctttaaataactccatgacttagtttatagtcataaacaacacttatctaatggtacgaaattattaaaagaatgatctgcagtctgtacctattgagagatttttctgtctaagaggaatgatgggaaggcatctgtttcctggaccttgaactttccagacatgcatacatcctctggcctagtcaccctgagattccaagggcaggaattgtgatcaggcttagtaaattggtttttgcttgtttgtttgtttgaagattcccaggtgtccctgtgtattgccaggctcagtgcaaacaaagagttcctcttgcattccagaacaaatagaagattctaagtaaagttccaggcattgaggaatggagtcagggaaacaagatacatgctaagttaaatggtgagctacagggaccaatgaggaaagttaccctgccttaaaatgagagagatctgctcttgagcgatcctagcctgaatttgtggaaatggttgaaagaagaccatagtctcccctagcttgtcactgagctgggaagaattcagaaaggaagccatgcgttcagcatttttaacatgtcctcatcggcgacgggatgtcattcacacctctgtaaaatctaacctctttttttccactttcaccaccaactggtgactattccacactattcagttgatacgcgaaatcagtattaaaattttggcaaggagctggagagggtggctcaaagtttaagatcactttaatgctttcccagagaatccaggtttggtgggtatccctgtaaggtagcacacagctgcctgtaactccaggaaggtcggtcccctatgccttctgcctccacacacacgagttgtctagatacaccggcaaggacacacaaattaaaaataaaacacgtcctgagaagttggccgaggaatttacgagtataaggcaggtgctgcttaatgaatcaatgccatgaatcatctgagactctcgtgacgttttcgatttaccaacccaacccaagagcctttggcttaggattagggtagaccttggatctggggctgttgggaaatttgtgagggtctgaagcatgatcatactggagggctaaatatcatattctgtatatcgtaaagttcccagttacactcacaagtttgcctaattaaggaagtgtgtaccttgggcctccttctatgacagaagcgtgcgcagttactcgaaaggtcatcatcacagctagttgagagttctttccctgtgtttactagttctccgaaagcgtcatacagcgcgttatgatcaccccttctccagtccttccccagctcacagactgcttccctaccctcgcaacttggtgcggttttctaaaagtctttcaaaaagcaattttgctgcccaaatactcctggatgtgtggttctacgctggcatgggatgacttaccaggaacaacactcttacagaaaactaacactctctctccctctctctctctctctctctctctctctctctctctctcttcccaggaactaaaaactgccagcagttgtatgacttttggtgactgtgtgaccatctcctgtttccctgctgggatttggtctagctcggtctcacagagattttgttcatgttgcggccttacatatgcattttccctgtggtagccaatatataatgtttccctgtgaccatccactgtctcaagcccttagatgcgttctgcccccttggaccttgaaaaatgtgtaggagggagattacagggtttgtttttttaattaggtattttctttatttacatttcaaatgttatccccctcaggaccacccccacctgctcaccaacccacccactcctgcttcctggccctggcattcccctatcctggggcctagaaccttcataggaccaagggcctctcctccagtatgtatgtatgtatgtagcaatcctctgctacatatgcagctagagacacgagttccaccatgtgttttctttggttggtgttttaatcccagggagctctgggggtactggttagttcatactgttgttcttcctatggacctgcaaaccccttcagctccttgggtactttctctgcttcttcattggggaccctgtgctccgtccaatggatggctgtgagcatccacttctgtatttgtcaggttctggcagagcctctcaggagacagctatatcagcctcctgtcagcaagcacttgttagcatccacaacagtgtctgggtttggtgattgtttatgggatggatccccaggtggggcagtctctagatggtcattccttcagtctctgctccaaactttgtctctgtcactccttccatgggtattttgttcccccttctaagaaggatcaaagtatccacactttggtcttccttcttcttgagtttcatgtgttgggagattacagtttttatgttcaatagaactgaaaattctgcaatctcttattctctgtaccttggctagttgtgatctctgtgttaacctccatcttctgcaaacactgcatacaatcacagaatgaacaagtcatacctctaggcaaccccaaagttatatatcataatcatcaatacctaaagacactgtacacaagagagtcctagtattatgaattccttagcttaaaatgggcagtaatccccaattttaagattagtgctctactagtgagtcgcttggggctaatgagcagaagtgagctcccaggggattctgaatgctagtcttgtgtctcagttgggtcttggagatctctgtgtgtttaactttgcaaatcaaatttattgatttttttattcataatttatacacctgtgtttggacttaggatccatttgtaagcaacaatatgatctatcctatgttagaatcattgaagccaagacatccataccctcctttgtcatgtaaaggcgtgcctgattctgggaagtgttctcagtgaatgttgaagagaatctaaggcatgtcatctcttgcagggtgcaaagtcacagagggatagtggtgtttggttccctaggactctataaacccaaggtgtggggggggcatgggatcagtcagcagtcagaggctctgtgcaaggagttctgatctcagtgaggcctaaacaagaacaaggctaaactcaggacataagatcatggatcaccccttaatatctctgggtgatctgggtatgcaatcatgttccccctcccctcccccaggtctgtgaaagtcacactcctattgaatctctgtcattatttccagccttattgaaacctgactaatgaatcctcaccttcttcttccccctccccctcctcctttctcctctctcattcctatcaaggccactggccttctggactccctgaagatcttcttctgcctctcagagtaggtcccactctacctgaactgacgtgtatctctctctctctctctctctctctctctctctctctctnnnnnnnnnnnnnnnnnnnnnnnnnnnnnnnnnnnnnnnnnnnnnnnnnnnnnnnnnnnnnnnnnnnnnnnnnnnnnnnnnnnnnnnnnnnnnnnnnnnnnnnnnnnnnnnnnnnnnnnnnnnnnnnnnnnnnnnnnnnnnnnnnnnnnnnnnnnnnnnnnnnnnnnnnnnnnnnnnnnnnnnnnnnnnncatctatctatctgctgatagtcttctaagttaagggataattcccctgtagaatatttacacatataagagtatcactttgataatcataacaatgccatctaatgccgaaaccctgtctggaaaaccccaaaaaaaaaaaaaaaaaaaaaaaaaaaaaaaaaaaaaaaaccagaaaaagaaaaggaaaggaaaggaaaaaaggaaagaaaaaaagaaaaagaaaaaagaaactggctctggctctttctaacataacttatgtaataaaataaaataaaataaagtaaaattaaaaagatgaatttctaccttactcttaaatacctgcccatacttacagtaaagtacaagtcctcataccatatttaggaaatagttctctctcaaataaggatggtgttggcaggcccagccaccctctctccggggcagcctctcagaatcacaaagcatggaatactttccataaatcactactgttaacactataaaggctcttcagagtgacacactacagcaccaaggtgaccattggggaccattgggacattcggagtgagtgcctctgctacatcagcaaacgcacaaaaaaatgtcagaattcagattgtcacttcacccaccccaagcaatcttgtttcatgaaagaatttaaaagaaaaggcccgcttaaaatataaacacagctttaaagcactgtcagatattaagttcccagcctcctcatgactgccatggctaatgtatgtgtattgtgtgagaatttatgaagcgctatgtgcatatttattcgttacctttaacctagtgaaactagagaagcagcagcttacatgcatttaaaagtaactggtggggggggggggctggtgcagtgaattatattgatgcctttgaaagggtagggatccccaagcccctcccccacatacccaatctgagagtctggaaatgaaactgaactgagttcaggtggagactccccgatcgccagcagcctttctcttcctcttctggctggggttcatgttctaggacgtcttactccttggaaggtggagctgtgaggcctactgtgctactgtcattctaggaaatgacattctagctagacaaagtgaccgttgagactgatgccagccccggcatcaatggtggaagagtgagtaccaatgttagttacggaagaaaactgcgtcttcaaaatagcccagggtgtcttttagggatccatccaatgacagctttgccaccttcacaatgtcatctaacttggccgagttctccaggcagctgatcagttccaagaagggcataacatggtaggaaggcagggacatggaaggccatgccaatgaaccttcctttcagatctgacataaccttgctggcatccattcctaattgtggatgtagaaattttgttttgtgtggccccacagctctcttgccacagcctccctagagggtcattcatggttctttgggggtggcaatgagaatgtatggacagtggtcatgaatccctccaggatgccaaagttgttacaggtaaccttggcaggttggtgggtgggtgggtgggggtagaaagggtatcagttggtggttcaagaagcattgctaacaatcttgaatgatttccagtacttctcaggctacaggtccatcatgaacatgggggccccagcagagggggcagagataatgacccctttggctctacctgccaactggactctggtcttctataccacagtcagtacactagtagacccacaacatgctcagcgccagcttccccccatttggtgttatctgaagctccttgttggatagagatggtacccccttttttattagatattttctttatatacatttcaaatttcaaatgctatcccaaaagttccctataccctcctcccatcctcttcccctacccacccactcccgcttcttggccctggtgttcccctgtactagggcatataaagtttgcaataccaaggggcctctcttcccagtgatggctgactgggccatcttctgctacatatgcagctagagacacgagctctagaggtactggttagttcatattgttgttccacctatagggttgcagaccccttcagctccttggatgctttctctaacttctccattgggggccctgtgttccatcttataaatgactgtgagcatccacttctgtatttgccaggcactggcatagcctcacacgagacagctataccagggtcccctcagcaaaatcttgctggcatatgtaatagtgtctgggtttggtggctgattatgggatggatccccaggtgggatagtctctggatggtccatcctttcgtcttagctccaaactttgtctctgtgattcctttcatggatattttgtttcctattctaaggaggaatgaagtatccatccattagtcttccctcttcttgattttcttgtgttttgcaaattgtatcttgggtgttctatgtttctgggctgatatccacttgtcagtgagtgcatatctaatgacttttttttttttttttactaaaaaatagacttgattttttaacttttttttttgtttgttatcaagtagctttcaagaaaagctgtatgacacttgcatcagtattagcagttacagcactccaaacatcactttcccagtatttaaaattaattctcattttaggagaatttaacattatctggctattctgtggcagggaaggttggtagctatatacacagggtctgtattgtgctaaggtctccagccattgagttctgcaacaacactacttctgcaaaccttaagagcagtctgtttcttcaagtagatctttttttttcttttcttttcttgaagcctttaaaaatttggttctcgtgggccaggctgctgctgggagccacattgatgtgggtggcctgggctactccgtgagacctgggtctgaggccctgctgtagcaggggtatgtgttgatatcccttgtccaggttgccaccgggagccatgcagaagtctgtggcctgtgctgccaccagggagctatattgacggtagtggcctgcgttgccacctgagggtttttttttcctttttagttttattaattaaattatttattttacttcccaatcaatcccagcttccccttcgtcctctcctcctggtcccccactcccacatccccttaccctaccccagctgtcctccccttctcagaaaagggcaggtctcccatggatatccagcagccttagcatatcaagttgaggctaggtgaggcagccctcagtaggaggaagggatccaaaggcaggcaaggcagtgtagccagacacagtccctgcttccactttaggagccccacacgaagacccagctgcacaactgttacatatctgcagggggcctaggtccccatttgactaaggtttttttttttttttttgaattaggtattttcctcatttacatttccaatgctatcccaaaagtcccccataccctcccccccccactcctctacccacccactcccactttttggccctggcgttcccctgtactgggccatataaagtttgcaagtccaatgggcctctctttccagtgatggccgactaggccatcttttgatacatatgcagctagagtcaagagctcaggggtactagttagttcataatgttgttccacctatagggttgcagatccatttagctccttgggtactttctctagctcctccattgggagccctgtgatatatccaatagctgactgtgagcatccacttctgtgtttgctaggcccaggcatagtcgcacaagagacagctacatctgggtcctttcagcaaaatcttgctagtgcatgcaatggtgtcagtatttggaagctgattatgtgatggatccccggatatggcagtctctagatggtccatcctttcgtcacagctccaaactttgtctctgtaactccttccatgggtgttttattcccaattctaagaaggggcaaagtgtccacactttggtcttcgttcctcttgagtttcatgtgtttagcaaattgtatcttatatcttgggtatcctaagtttctgggctcatatccacttatcagtgagtacatattgtgtgagttccattgtgattgggttacctcactcaggatgatgccctccaggtccatccatttgcctaggaatttcataaactcattctttttaatagctgagtagtactccattgtgtaaatgtaccacattttctgtatccattcctctgttgaggggcatctgggttctttccagcttctggctattataaataaggctgctatgaacatagtggagcatgtgtccttcttaccggttggaacatcttctggatatatgcccaggagaggtattgcgggatcctctggtagtactatgtccaattttctgaggaaccgccagactgatttccagaatggttgtacaagcttgcaatcccaccaacaatggaggagtgtttctttctccacatcctcgccatcatctgctgtcacctgaatttttgatcttagccattctgactggtgtgaggtggaatctcagggttgttttgatttgtatttccctgatgattaaggatgttgaacagtttttcaggtgcttctctgccattcggtattcctcaggtgagaattctttgttcagctctgagccccatttcttaatggggttatttgattttctggagtccaccttcttgagttctttatatatattggatattagtcccctatctgatttaggataggtaaagatcctttcccaatctgttggtggtctttttgtcttattgacagtgtcttttgccttgcagaagctttgcaattttatgaggttccatttgtcgattctcgatcttacagcacaagccattgctgttctattcaggaatttttcccctgtacccatatcttcgaggcttttccctactttctcctctataagtgtcagtgtctctggttttatgtggagttccttaatccacttagatttgaccttagtacaaggagatagtaatggatcaatttgcattcttatctacatgataaccaccaggtgtgccagcaccatttgttgaaaatgctgtcttttttccactggatggttttagcttccttgtcaaaaatcaagtgaccataggtgtgtgggttcatttctgggtcttcaattctattccattggtctacttgtctgtcgatataccagtaccatgcagtttttatcacaattgctctgtagtacagctttaggtcaggcatggtgattccaccagagattcttttatccttgagaagagtttttgctattctaggatttttgttattccagatgaatctgctgattgccctttctaattcgttgaagaattgagttggaattttgatgggaattgtattgaatctgtagattgcttttggcaagatagccatttttactatattgatcctgaccatccatgagcatgggggatctttccatcttctgagatcttctttaatttctttcttcagagagttgaagttcttatcatacagatctttcacttccttagttagagtcacaccaaggtattttatattatttgtgactattgagaaggatgttgtttccctaatttctttctcagcctgtttatcctttgtgtacagaaaggccattgacttgtttgagttaattttatatccagctacttcattgaagctgtttatcaggcttaggagttctctggtggaatttttagggtcacttatatatactatcatatcatcttgcaaaagtgatattttgacttcttcctttctaatttgtatccccttgatctccttttgttgtcgaattgctctgtctaggacttcaagtacaatgttgaataggtagggagagagggaacagccttgtctagtccctgattttagtgggattgcttccagcttctctccatttactttgatgttggctactggcttgctgtagattactttatcatggttaggtatgggccttgaattcctgatctttctaagacttttatcatgaatgggtggtggattttgtcaaatgctttctccacgtctaacgagatgatcatgtggtttttgtctttgagtttgtttatataatggattacgttgatggatttctgtatattaaaccatccctgcatccctgggatgaaacctacttggtcagcatggatgattgttttgatgtattcttggattctgttagtgagaactttattgagtatttttgcatagatattcataagggaaattggtctgaagttctctatctttgttgggtctttttgtggcttaagtatcagagtaattgtggcttcatagaatgagttgggtagagtaccttctgcttctattttgtggaatagtttgtgaagaactggaattagatcttctttgaaggtctgatagaactctgcactaaacccatctggtcctgggctttttttggttgggagactattaatgactgcttctatttctttaggggatataggactgtttagatcattaacctaatcttgatttaactttggtagctggtatctgtctagaaacttgtccacttcatccaggttctcctgttttgttgagtatagccttttttagaaggatctgatggtgctttggaattttcaggatctgttgttatgtctcctttttcatttctgatttttgttaattaggatgctttctctgtgccctctagtgagtctagctaagagtttatctgtcttgttgattttctcaaagaaccagctcctcgtttggttgattctttgaatagttcttcttgtttccacttggttgattttgcccctgagtttgattatttcctgccgtctactcctcttgggtgagtttgcttccttttgttctagagcttttaggtgtgttgtcaagctgctaatgtgtgctctctctagtttctttttggaggcactcagagctatgagttttcctcttagaaatgctttcattgtgtcccataactttgggtatgttgtggcttcattttcattaaactgcaaaaagtccttaatttctttctttattccttccttgaccaaggtatcattgagaagagtgttgttcagtttccacgtgaatgttggctttctattatttattttgttattgaagatcagccttagtccatggtgcgctgataagatgtatgggacaatttcaatatttttgtatctgtttaggcttgttttgtgaccaattatgtggtcaattttggagaaggtaccatgaggtgctgagaagaaggtatatccttttgttttaggataaaatgttctgtagatatctgttagatccatttgtttcataacttctgttagtttcactgtgtccctgtttagtttctgtttccatgatctgtccattggtgaaagtggtgtgttgaagtctcccactattattgtgtgaggtgcaatgtgtgctttgagctttactaaagtttctttaatgaatgtggctgcccttgtaatttggagcatggatattcagaattgatagttcctcttggaggactttacctttgatgagtatgaagtgcccctccttgtcttttttaatgactttgggttggaagtcgattttattagatattagaatggctactccagcttgtttcttcagaccatttgcttggaaaattgttttccagcctttcattctggggtagtgtctatatttttctctgagatgagtttcctgtaagcagcaaaatgttgggtcctgtttgtgtagcctgtctgttagtctatgtctttttattggggagttgagtccattgatattaagagatatttaggaaaagtaattgttgcttcctattatttttgttgttaaagttggcattctgttcttgtggctgtcttcttttaggtttgttgagggaattaccttctttctttttctaggacgtggtttccatccttgtattggtttttttctgttattatcctttgaagggctggatttgtgcaaagataatgtgtgaatttgattttgccgtggaatacttttgtttctccatctatggtaattgagagtttggctgggtatagtagcctgggctggcatttgtgttctcttagtgtctgtataacatctgtccaggctcttctggctttcatagtctctggtgaaaaatctggtataattctgataggcttacttgacctttttcccttactgcttttaatatactatctttatttagtgcatttgttgttctgattattatgggtcgggaggaatttcttttctggttcagtctatttggagttctgtaggcttcttgtatgttcaagggcatctctttctttaggtttgggaagttttcttttataattttgttgaagatatttgccggtcctttgtgttgaaaatcttcattctcatctactcctattatccataggtttggggtcttctcattgtgtcctggacttcctggatgttttgagttataatctttttgcattttccattttctttgattgttgtgccgatgttctctatggaattttctgtacctgagagtctctcttccatctcttgtattctgttgctgatgctcacatctatggttccagatttctttcctagggtttctgtctccagcattgcctcactttgagttttctttattgtgtctacttccctttttaggtcttggatggttttattcaattccatcacctgtttggttgtgttttcatgcaattctttaagggatttttgtgcttcttctttaaggtcttctacctgtttagcagtgttctcctgtatttctttaagtgagttattaaagtcctccttgatgtcctctaccatcatcatgagatannnnnnnnnnnnnnnnnnnnnnnnnnnnnnnnnnnnnnnnnnnnnnnnnnnnnnnnnnnnnnnnnnnnnnnnnnnnnnnnnnnnnnnnnnnnnnnnnnnnnnnnnnnnnnnnnnnnnnnnnnnnnnnnnnnnnnnnnnnnnnnnnnnnnnnnnnnnnnnnnnnnnnnnnnnnnnnnnnnnnnnnnnnnnnnnnnnnnnnnnnnnnnnnnnnnnnnnnnnnnnnnnnnnnnnnnnnnnnnnnnnnnnnnnnnnnnnnnnnnnnnnnnnnnnnnnnnnnnnnnnnnnnnnnnnnnnnnnnnnnnnnnnnnnnnnnnnnnnnnnnnnnnnnnnnnnnnnnnnnnnnnnnnnnnnnnnnnnnnnnnnnnnnnnnnnnnnnnnnnnnnnnnnnnnnnnnnnnnnnnnnnnnnnnnnnnnnnnnnnnnnnnnnnnnnnnnnnnnnnnnnnnnnnnnnnnnnnnnnnnnnnnnnnnnnnnnnnnnnnnnnnnnnnnnnnnnnnnnnnnnnnnnnnnnnnnnnnnnnnnnnnnnnnnnnnnnnnnnnnnnnnnnnnnnnnnnnnnnnnnnnnnnnnnnnnnnnnnnnnnnnnnnnnnnnnnnnnnnnnnnnnnnnnnnnnnnnnnnnnnnnnnnnnnnnnnnnnnnnnnnnnnnnnnnnnnnnnnnnnnnnnnnnnnnnnnnnnnnaacccaatcacaaaagaaagtcattagaggtccccccctttttaaagctgtctgttcccagctttgactgtgtcatagaacttgctgtgggtaggatgctgaagcacgtagctgagatcaatgaaggggtcactgatggcaacaatatctattttgtcagaattgaaagcaccctggagaccaggcacctaatctgactaaatcttctcactctaaccttcaccatcctgtctcatgggtgaggctggcatttcaggagacgaagcagctgtctctggtaatggggagaactggagaacctaagacttcactttagggttaagttaatagttgaagctcaaacaggcagagttcatgaatccaggtagtcattcagactctggggctattggagtcggtgcttctgggagtctgtgaatcggtagtccagggaaaatcaggggggagtcaacaaccgaatagagagagtcataattctccatttacattactgaatacatatataacaatacaactcatatttattgtatttctgtcctttccatacagggtgttttagattgcaacaatattgtattgtaagtagattcctacactagtgttataaacagattgatgaagacaacactgtgggcctgcatctgagccgtcttgtgacctagtatgggctttcaactagattctaataataaaaaacacttaccacatatttaggtatctctaagcgattgtttcccttgatacaaagtggagaacactaatacaggttttcatgaattgttggccttctttgttaattcatgtagttcttcgaaatggccactagatggtagtctttagttagtattgtcacctctgctccatgataggagctttgattctaaccagaaacattttgtgtgttcctgacgcccttttcctcagatgggtgaggcaaagggcaaggactccgtgtggttcaagagtcttcagtcttgaatccttaaattttcttcttcgtagaccttactttcggatactatttattgaacaattttatttgtctccactgtacctttaagtgatgactctttgaagagggttgaggtctgtacttacaagggtcaaaaagataagagtacaaggataatatgtcaggcgaagaacagggacgatgagcttcgggatctgctgtcaccccaagtaaatcccagaattcccccgagctctgcaatcattcaccatcttagctagagttgccggacattgatgcaccgttgccaaatacatgtgtggtctctctggacaatcggaaaaaaaaaaaaaagtttttcctcttctgtgctgaagccttgtgattttttttccccctagcaaaaccaaacccagtgagcggcagttaacccgcactggctgtttgcgcactgtgttccaagggctctctctatttgtcatgagtcatccaattaacgtcaactgtaattatttcctcttcattttccctttccactgttgagtctcccgaagtcaccaatttccttaactaattttaatatcgaaacctgcatttcaggttctcctacttcacacaaccaagaaaaaaaagaaaaaaaggaatgagatgcccttttcgattttaccctgaggtagagcaaatcctttgacacattctgagaattcttcctgttcagttttatcatctgtccgtacttccttgaagttcacttatggctgaacacacgtatttgcatacggactctcataaagtcattttcagtaactctgcaattgataactctcccagatagacacatagtccagagttacctgttgatctgtttcgctgcctaaaaggaggagggcagcagtggagacaggacggactcacctgggggtaaatgtgaactttggggccttgaacaacaacaggaagcttggtttctggctgctaccacattaaaactagttgaggtttttattgtttgtgggctgtggaaattttatttcctggcgtctagtaacagttggcgaagatccccattaccctcactgtgagaagaagccccatggtcactccacagctattgagagctgctacaccccctcctgccccaccctgccctgccctgccctgccccaccccaaccccccttccgccgcccagagacacagctgcctcctgaccaccggaggctccagttggtttaagcaagattagttcagctttgcttagcgaagggtcactgtctagatctgtcttttccacaccagagaatcccatggtggattcaatgccctcactcaaatttcccagccaccagccaagttcccttcttgtctcctcccccacaaaatcttgtttgcactggacgtggcagttatgcgttatcgggctttttgatggtccgaggagctctttatattcacaagcattgcgcaatggaatgctatttagacacccatgctctttacaagcaagctagcatctgtttcaacagcaagttgcttgaccgttttttttttttttcatcccagagttattacaatctctcccaactccttctcacttaatggtttttagcttctctcatggtgtttctgctccagtcactttttgactccccaaactgcacagatactaaaaaaaaaaaacaaaaataaccaaaacaacagcaacaacaacaacccgcttggtgttttttaaacagtaccaggggtcttcctagaagacactctgggatacgggttccctgcttttcctgcacagaatgagattggccaaactggatttcatcacctggctcacatttcatcaggaaattctactcaagcagtgttaacattcgctcatcacgtcacaaataataattgaccacctaattataaaaaggaaggcattcactgctccgagtatcaggggtggagaaaaggcctatgtgtctgtgtatagttttgggctctaataacccctacgaaggaagagtatgtactgacttgagaatctgttccatgaaaaatgttagttagctcggctggcagaatagaacgccacaggctgggtggtctaagtagcctacatgcatgtttctcttgggtctagaggctggcagggcctgcctgcacagcctagtcctcatgagagctgaaatcctgtttggttttgttgttgttgtgtttgtttgttttacctcctaagcttccagaagagcttctgcattgtaagcagactggtctctgagtgtctccgggtgcttccgcagatatacggtctctaaagtcaaggagggagcctcaagtattcacagagccaattcatattgctaaaaggtccatagggagactctctaatgtttcactcatgggtgggttagtggtttcagtaaaactagatacaactccccagggacatttatttgattgttaaaggcctgctccgtaacttgtcatatggttgtttagtgcagagccagcccgttcagcatgctgccttcgattctctcttatagcatgccacgatcatagttgcagcatatccggtttctccggtttctcattatcggtatcttttcctcacggccagtgggatctcccacttcctctcgcagagtctgactctccagaagcatgcagcttagttgatcttatcagacactacttcccctacatctctaaatcctgggctttacctccagtagtccagaccacagctcaggtaacaagtgaccagggagtggcatcctgatcctggaaaccaattccgaaccatcaaagacaagaggacacagcgaaacgtacgcagacgtgatctgatgccgtggtgacgtgcccaaagcagggtacgccttatcttgaagcaagcatcaggaaagaataactgctcgtgagatctttggagcttctctagccatagacacatgtatgattaagtttgatgtttatatctgatactctactgccttccgtacaccggaaggctccattgtgagcgagagaaagaaaattacataaacagaaagtatggtatagaaggaaaaaaagaaacaaccccacatttaatttttttttttgttttaatgcttgcctttaattttggtttgtgcctttttaagttggatctactgtctgtccataggtaacatctccatggtaagctttagcatggcaggtcagtgtatctctctgcccacggcagtcctgctgtagggccactggggatcagtacacagcagcgacttgctgaacgtcagatccctcacaaacagcagagcagagacttgagcccacacagcctcgtcctcatgtctggcttcttaatgctagattacacaattagtagatctctgtttattttcctagtcatacgctctgcttacatttccataaatggtaattagatttccccccccccccttctctggactgtaagtttgtataattgaatttttatgggcttttgcaccactggtgatatttgtaatggatttatttttcaaagtcaggatgttcaatgaatcctataatctagacatacctcccaacaaactggagacctcccagttgatctttcattggacgaaaattctgttcaccaaacatttgatgtacctcctagatttgtgttagtatagcatggcaaacattggggtttggagcacaggagcaagttccaagtcaggttcttcttgggttgatccgctgagggcaggcgggacgagtgtctttcttccaaggtagcaggattcccaagcatcaaggcctatgtaccacttcagcttcaaattccccttttaatcataatgccttccatattgaacagctcacgtaattatcttactttaactcgagtatctctttaaataccttctctccaaataaacaaagctacaatgtaagttagcatctccgggtagtttggagtgactcatgaagtcgttagcatcggcctctcagccacagccgttgtttgtcctacactcacaaagacaagtccatccttctccatctttctcatgtgtggagactcgtgtgcccctgagaggctgatagctgtatggcctcagctgctccaggggctggagatgcttcccagcgactggtccatgagttaactattttacttcttccttggggatttccaccgagagcattcgttacatgaaaggtttaaaatggcatctcggtttgggctgtagtcctgtgactaatgtgtaccgttagtccaatgtcacacacaaagagggaaataataaaaattaaagggctgtctttaacatagtttatcataattaatgatcagtgctctattttgtgggcacatgcatgtctgtgtggatgtgtgcacatgtgtgtggagtggttatgtgtggatgagtgaatgtgtgctcacttgcgagtgtttggagggaagaggtcaatagcttccttttccaccttttatttttttggaggcaggagctctcatcaatcccgctagctaggctgcctggacagaaagctccaagaatccttgtctctgcctttgcctccagtactggaatgacagaagggcattgccatgttcaaattgtatgtgggccctgggaatccaaactcatgtctcatgctaacaaggctggcacatttccctccagttgactggttttaaaactgcacaatctgtctcaagtgccataagaacgttttgctttgctctatgtttttacttgaagatttccccagaaggcatgctgcttggaaggacaatgcttgtttgtttgtttgtttgtttgtttgtttgttttaaatagggaagggcaaggagagtggtgaacagtgcaaacagtaggaaaaaaatgacgcaattctaatggacgtttgtaggtcagtgggacatgagccctgaggggaaaacagaaaccaggctgtgtgagcaggggtaaaacaggaaggctggagacagggaggcagggccctgagaggtgagggggtgggagtgagggtggggcaggaggcagagggtaggtggaaagggaacagctagcaagggggacagggaggaaggtgggcagggatgggactaaagaagccagtgaggaggcagggggctggctgggggtggtgcggaggtgggagcaggaaggcaagggggcagggacgcagcttcccactggtttcaggaagcagagggaccttcgaattttttcttgtcttggataacagatggtgtctgagtgacaaggttggacttctgtctttcattaaggaatgtctagaagtacatctacatagatttatattttctgcctccagtcatttgcccttcttcctaggattattcttccaggaacatcaacaaaagaaccaccctgcaaatgcagaagataacagtgtgcctgtgtgcgtgaacatacgcatgtgtgtgtgtgtgtgtgtgtgtgtgtgtgtgtgtgtgtgtggctatgtgtgtgtgcgtgcatgtgtgcacctatatttttgtgcccatgtgtatgtccatatacacacaagtgtgtgcttatgagagagagagagaaagtgtgtgtgtgtgtgtgtgtgtgtgtgtgtacctctgtgtgtatctgtgtgcctgtctgtatatttgtatatatgtgtgtctggaagcatgggctatctcacacatagcagccaccctaagatccacaagactctgcatagcagagtccttcatgttctgagactcagactcataggagcccctaggatagagattaaatccaattaccatcatagctacaaagtaacattttacagttttgattgttctctgccgccactgcttagtctctgaccccttatgaaaaagagagggggtcctgttttgaaatatcctttcatgatccttgttaagtagaccgatgtccacctgaagacacagatgctccatttgttgaagcaaaacgaacaggtcctgtaataaactgtgagactggaactttcctgggccatgaaaggtatttggagtgcgtttttcaaagaccatcccttcctttgaggaaatatgccatcttgaatctttactccttaaaaggccagatgtcccagctcagctgtgctggttgctgacctaagacaatatgactgagaacacatttgggttctttctgctcgacagttgtaactcctagtgagagctaagacactgagtcttaagctgttccctaataacttcagcacactggatataatgaatacaagtctcaggctgatttctgattcacagaaagatttttacaacctaacgattattatcaagccagcacaaacataaatcataaagacaaattacgttcatttgggggtttggccaccatttgaagtttcaactaaggaaaagcatcttgtgtcaaatcaagatcttatcatttactctgacaaaagtttccaatattcaatgctgagctcagggtaggattcaagcagtggttcctaaaccactctgagtccatcacttctataggatcatctctatctgcagggttggccagggagccacagaagccccctgaatctgtccttaaatgcttcatcccgcactgggcagccacctagtgaagtgctcatttgctgctctgtctgcggctcattgccagagccacactttcctggaaaacaagcagcctcctatcttccttagctctgtaaatgtgattgctagtcttcctgcgtgggagcttgaataaagaaagccacctccttccattctaggcccaagtccaagttcagccaatcagtgtgttccaaccccctcagccctgttccttaggcctccactaccctcagccagagccacatcattgcatgttagtcacccatctgttttgtcacccttgtgcaatcatttaacacggtgccaaaaccatctacctacaagtacctggattggatgcctccattggaaaccccttggtggcactatattttacagtagaatgtatctgaactccttcacaagcttactcagctcccgtccctcttaccactggccattctcatcctgtgctgcacagatctccatgccataggccacacacattggttatctgttagcagtgcctgtcccctcataaggaccctaattccttccttcactctgtgctagttcttctcgatgcagagaggcaccgatgcaccatatacatacacatggctttagctctactactgaatgtgaattttatataattatgacattgtatacatttatataatttatttttattatattagtcccctgctacacttgctcgcctcccccgacacccactcatctctttcctctttccagatattctgcacaatgccggccacgtggtactttggccagggtttcaaatacctaatgttataactaataaaaagaaatgaattgatttaatgtgtttgaagatttttcaggcagggtcacagtgtgatagcccaggctatccgcaaacacactatccttctccatcaacacggtgagacagctgtcatctacttgagtggcccctgacttctcaggtagcatatccaaatctctcttgtcagttaactggaacaatggtcaccacctttaccaaccttagcagaattttttttcctgtcctttcttctcttgcataatcatctgtgacctcgagaatctgtataaggcagattttacatacttagacattgcatgttgaaacgacacaccatacctggtacacacaactgtgaggaaatactttggccatgaagccatatttctccccactcccagggcactttctctaatggctggccctctgatctgtataccatatgggacacaaatgtaagcccttacattagcctgttttctgtcgtaagataatatagttgataagttaacaggaagtgaggtggactttgatgtgagttttggttttgagcaaggaacactgtttaagaatggcctacttgtaggttgagtcccaaggtggccggagacaagaatgagcatctatatgaatgttagtagagtctcactgctcttaaaatccaccgggacttagtcatgggcgctgcactctaatgaccttatccactcctaatcacttccacactcaaaccatctccaaataggaccattcctgctttgtggggaaggatatgagagttcaggcttggggcttacgtgggttgcctagagccctctaaggaacaaggggcagagataagcttgtattcaaatattcaaattgtatgattctcagtccaggacaggcccctccttcctgaagcttttaacttggaggcagggacttgatttttttttcttctttttttaatgattacatttgaaaatttaattttataacttattgggatcagcttatgactgattgtaatggagaagatactctaaaaaatagtattgaaataaataaagtaagtactgcagataacattcataatataaaagaatagtcttgggcacagacatagggggagggggccttagcctaggccttaccaccagttgttctttctctaagaagcttagcgatacagtgtctgaattctgctgcacaggatcctgaggttaaaggaagtgttcaatgccatctgctgagaggagccagaattccccctacaggttctctaaggtggctttgtgctgctctgaacactgtgaactcccctcccactatcacagtcactgctttttagcctttggctaagatcaagtagaatgtttcttcttgtggcttttaataattgatgtgttctccatccaaggacaacgtatttagactgtgtgtgcattacaaagaactgagctccacttaatggagaattttaaaataagaggtgtgcttgaattctcttggatcccattcttcttttgacattgtttcctccaacgtgccacagtggatcatgctttgataaacaggatgaagggccccaggtctgaggctgcattccagaagtatttcttccacagagctggggagcattttcctctgcacagagtattggtaacacgtatgtgttttcccccaaccccaccccatactcattcggggttagctttgaagaattgtgatggcatccaatgaaaataaagtgaacagaagaaatggcagattatacctgtccagggttaacgtgaaggatagtctttcgtgatataagatggatttccttatcagctaccatgaattttatattaggctcagttaaaagacaaacagaaagacagaggacaggagaaggcagagggcaaaaggttaaaaaaaaaaaaagataaggacaaagagaggaagaggaaagagaaaaagcaacgtcaatggctccgtaggtcctgaggtgagtgagctgcttgcagctcaacagctttggtcagcatcctgttattgtctttgggcatcagaatacacttcaccaccctttgaaatttccatacacactacaatgattttgctgtaatctttctttcctgggaaacggcttattcgtttttttttttgttttttttttcttttttttcttttcaacccttgaggtcattttcttgtttcaggttttatttttacaaagtcctgaagactttgcaatgggtaaaattgtgaatttagtcttcagcatctccatgacaaatttaactctgggccaatcactaagagggggtgggggtgggggtgggggtgggggaagtggcttcttcctccccaggctaaaatgtgacatttctaaatatgcccatcattacttcgttttttgagtatttgaaaatgcatgattataagtcttagttctcagggctttatgtcaaacctacttactgtcccttgtagctgccgtgtctttgtttttgacgagcattgagatactctgtgctcttcagttctttttaaactgcctggggcttcaagcgcctctgtcactggtgtggagtagagcccacaggaacgatgtcacttcctctcccttccccctccctactcccaccaaagagcacttcctgccgcttcatttcaactggctgtgctgcgggatgccatgttagctcagggcactcaatttttttttttttttttttttttttaatgagagcggcagttctggatacacagagctcagagcgccggaactgattctttgtgaagccgaacccggatctaactctattcctagaagagcaccagttccctccttacagaggaggccactaaatagaaaacttccacagacacaaggctaatggaattaagttaaggactcattttcgtcttagaaaaataacacatatagaggggcatgatttttcgctcacattgaaaatgagttttcacttgtataaaagcgaaaatataatgactcattaagtacactgtatggctgcagggaaaccaataaaagtgcaataattccaagtcatattaattatcatccagaagaagccagaacaccttgagtcttagcacaacaagaaacacagactgtacacagcatatcacgcatacggtagagtacagagttcacgctgactccgtgattcaagagcttcttcctcggaacacagaatggcccaacgtgtacacctgcccaggcagcttgatctactgggctgtggctcaggcggacaccaggcttcacgaggctgctcgcttgcctctcagtgctggccgccgttggttcttccttctgagcacaggatttctgctcatttttattctggaaacaattgtcactgtgtgagacaatttgtcattcccaaccctgggacagtcttccttgaatgaggattctcagtttgctattctttctcccaccaacacctctgttcccatcgagaaaactgttatctgttcaggcaaatcctgatttcggagcacactgactctctgccaataggatttttggttagaagttatatacacacatatatatgtatgtgtatgtgtatgtgtatgtgtatgtgtatgtatatgtatatgatataatacacatatattagtatatgtatattgcatatatatacacatatttatgttgtattttagatttcatcttttttaattttctctttataaaactcaccttattacctgtaataaatttctaataaataaactttctaacccctcctcccctttaccttgcctttatctctagccctaagcaccaaagggtacaacctctactctccagttgctttcccccacaccactggagcagttcccatcgccgtccatctaactttttccgggacctcctaaagatagctcaacgttcccagttcaggtttgagggccttatgctctcccaccagacccaagccagactccccaaggcttaggaggccatggcgctactcagacactaccatcccccacctcttccttcccagcacaccttgcttccattccgcctctgcgccagtacgcatgagcatttctctttctcgtcgtgtctgtgccagattctgtccagtgtcactacacttggtgctctgtgctctccccatgtcctcctgtggggtcatgcgttcaaatctcagctgctcctgtgtcctgtgcagggtgaccttttccttcagacagctaagacttggttactgggctaagcaccatgtgcctggctcatttctccacacaaggagtagtttccagaacaaaacactaaaccttagaatggccagtcaccagaccttttcaaaaactatcctctaaatattccgagtcttttttttttatttttacattaatatgcattttaaaaaattgttttaaaaccctcaaattatttttaaaggtcttccatttgctcttttttctattgttgtacgtgttggtttttctacatagctagttgctataggtgagtgttagactgtgcatactagtgttacatatttaactcagcctatatttcttccagcggttatgatttgtatcatctcctaattcagtctgttagtatcattccaaactctgggcttgacatgatgcatttggaagatgaatcttaatgttcttaaccatcaaatgaaagttacctgcctatacacacagctcttctatttcaattagtgtagcttctgtagtcctttaatgacatctgcataaagaaggggtgtgcatataaggcaggagtcaaatacaaattttaactgctaactggtatacttctttattatcacttcaaacttatcattaaaaaatagagtatataaaagattaattgtagactttaaagtacagttaagtataatctggttcagtgacctggttaaatccttgatccaggcacttgtccatttccataggagcactttgtcatttcattctggatattctaaaaataatataagcattaagctcaaagaggtaactcacaaactttgcctcatgataaggatggcaagagagttaaccaaaggggtagagactatagtcctaagtaaaggaggtaaataatcccagagcaagtaacattaaaacactgtcttaagaatgaacaaaaattcaacaaagaaagaaatgagtgactgggtagaagaggtgacagccttcaaggtgcggggcttgttgggaatggagatttcgacagctgtagaactcaagggcgcgctatttggtctgtgagcctacagtgaaattctgcagatgtgagtctagtaatgataggtgtaggagcataagaaaatacatgtatattatctaccatgaaaaaaaaaatcaagtctgttcaagtaggggatggtatgttttagaaagacaggtttgttaagatcacggaagacagatgtttgagccaggggaacgagggaacatctttctgtgtatgataaaagattttattattaaagtacataacttgtgaaaagatatatataagacctggtcagttcattgtaacttgtcttatttttttaaataagtaaatttgattatatctttgattctatagataagtaggaaaaaatgttggacaaggagagcaatacctctttacttgggttttgtttgcctgttggaaggttgtgatccaaagctaactcactctctcaccaagcctgtgtttctctggactcagtttcaagggaatacctcaggctttggtccactcacaggccacttgtgagtcacagtctgaacatgaggaaatgctcatttacttttgcgtagtcatggccatgagaccttttttgtcattgttgaaagtactgttctctgaggaggttattttctgccacaggcagggagctgaatgtcacaacccaattccaagcgctccctcgccgtcctgatagcctggggaagctgaggtctcacatcagcctggagcacacaggcttcatgtgatggagatcggctccgttaattagctgtttcgggattcttaatgcccgtggctttggaaacacttgttaacccagagagggaggagacaagctggaagcagctggattccagcctgaatgtattatagctcatttcaataacacctgatctttccaaatccatgttcgggatctgttggaaattatagttgacttaagttgttctcagtgatgcatccaggagattgcaattcaaggcttcttgaagccacagaaacaagagagcagcagaaaagaactgattagtggaactttctgaacatacatgtgccattttccagtggctggaaaacagatattaagggagagggagagagaagccacaggttatgcagggtacccaggagtttgtgtttctgtcttaaccaaaccgagagccacttctctaccactgcacactgcaatcactgctcaaagctggcattcaacagactcataattcctctgagtacaattctcttggcataacctgaccaaccacataaaacctaatgaagaaaacaaccgttgtcatgggcaaccaatgcaggaattgcatcacaagcaaaccacatactttctgtcctaccgaaggctggagtcctgcacaaagcaaggcagtgtcctttgtgaatgggattaaaccattttaagtacatgtgtaaagttacagtgaagcccctgattttgtatctgggatcgaaatataattactatatccccaagcccccacatctaaaagagctatataaaaatacctacatcaaatttaagaaaagaagcaaagtagaattatgcttccatttttcccatagaacccactgcaaactaatctgtttcaagataacacttaaaacagccacccctctgttgcctggatataaataatgattctactctctcatattcatcttctggactaaccccgagaagtcaaggtgggtctcagtggctcaccactcctgactgctgtgtggtgggtcactttctgagatgccagtggccctgtgttgttttgacatttgcatacaatagattcctggaagccactaagtgttcggtgagtatttgttgactgaataactgaatgggtgatgggaaggcccgctttaaagttagtctagtaaaaattttaccataaagaattatctgaggcctggagagatggttcagcggttaagagactgactactcttccaaaggtcctgagttcaaatccccgcaaccacatggtggctcacaaacatccgtaatgagatctgatgccctcttctggtgtgtctgaagacaattacagtgcacttagatataataataaaatctttaaaataaaaagggagtggggtggggatttagcccagtggtagagtgcctgccttgcaagctcaaggccctgtgtttggtcctcagctctggaaaaaaaaaaagaaaagaaaagaaaagaaaagaaaagaaaagaaaagaaaagaaaagaaagaaagaagaaaagaaagcagttcttagttcttagtacttaggtcagcctggtcaacatagaaagtccgcggccatccagggttacacacatcaggactctgtctaaagaattatctggtagtcacaaacaaaagctgaatttccttgaacttgataacagccattccctgccatactttcattcatttccttttatccttactaaagaagaaaatatggctgtaggaaatgaataatttgtagcccactcagagaccagaatgcttttgtggcaagtaaaaaaaatccaaaatagtgtttccttttgaatgcaaccctataaagacttgaattgggtgccataaatattaatgtgaatattttaaaactcctttactttctctttattttttacaattatatatatatatgtataattatatatataatcactaaatagtgtgtatatatacatatacacagacatatatacaatatcacacgtacacatatatatattcacagatgtatacacatatatgcatatacatacacatatagtgtatcatggataccctcttcactctcctttcttgtctcccccctccctgaaccctttcatcttcccaattattctctctcttatttcctttcttttttaaatctaattttattgttttgcttattcactttacaccccagccctcactgccttcctcctagtcaccttctcccataacccttcccccaactctatctccccttctcctctgaggaggtgaggctcccctgggtgttccctcaccctggcacttcaaggctctactaggctgggtgcttcctctcccactgatgccagacgcagcagcccagctagaagaaaacatcccactctcttattttcaatgcctttctccttgatgcacggaagttcagtagaggggattggttgtatgagcatggatggggttatttgctggattgttaccgacttgcctgtgtttaaaaagaagaaaacagtgcccctccccctggtgactggcttaaaatattttttttgcaagttttgctcctttaaaataggactctccaaacactgccacattcttaccttagtctaaaaccaaagacttttaaaagatactaacattatctctaattagcttaacaaatgttaagctaattaaaagaacactccggttccttccgtactgatctttcagtgcgtgctccagcctgctctatttgcctttccttacagcctactgctgggacgtgcacaattcaccttttctctcttttgcgtcaacctgaaaagaactgaatggaagttcaaccccttgcatacttagaacaccatcccacgatcatcctttctctcatgcttcatctataagtgactaaagaatctgtacaagtacagatgccaaaaatcccacaaactttgagtgattgattttttttttttttaatttgaaagtttctattgggactccccaacatgtgcctcattgctgtctggagggatgaaggtttcacaatttcaagacttcgtgattccttactttcaagtcctatcactaggaagatacccttctctgtagggttttcatgtaaaagcagtccatggctctagacgctaaaagcctactatcacctgcatgtgccgtgtctctccagagggtttcttagttaaccacatttgtattgaatcctcagtaacccccacagcgtgagcctaggtcttcccactccctcttcaaaagtagaacaaagctcttagaaataaatcagcagtgaataaatgataaaaaaaataatgtagaaactataaaacatctaaatatcaacctgaccaacagcttttaagagacaggagagtaggctcttcaagttagaggctctcccaatgcaaaataagccgtggtgtattagaactgacgactaccgacctaacaagcccctactttcaaatgttttggaattgagtaagctggtaccacaaccaattattgttaaattagatcatagacacattcagcttagtaaattattttcaacagagatcgcacaaaataattctgaatgtgccacttcctcttatctgttgacactctactatcctatcctgaggctgtttgtcagtcctgcccattcctggaatcgcagtatagggatgccactagcaggtatcagaacaccatgtcgccatctttaaattgtgcaggtagggtgtgtaccaaagatcccagcaacacagtaggtccaggaccgcacttggctttgttgattgtgtaattgtagaaaaagtgacagaaacgtgtttcttatgccaattactgtccatttaatctcaatagctattaagctgtaaagaggacaaaaacttcggaaatgtttttctagagttttaagacatgccacaaagactttccttggccaatgaggaaagagtggagtaacaacctatttactttgtaatctcagttttctcttatgaacacaaacccacataacaagcagcagtcatggagaacctcattcgctccaatgatgactttggctcttgtgcccctgtggccaccttcctgccctgctgtatcagagaacaaagctgactcctagagacattttggttcatctcagggtcaaggatgagctatgcagtcaagactcaattctgggtcaagtgttcttgttttgagccagaaggtagatacacgtcgttagtataatgctattgaacctatctccccaaagctcctaacctgtgtgacatatcttagctgaaggtcaggtcctgtctccgacagaagtctctggtttgagggtcagaatcctgggggagactctccagccccaggacagatcaaggtgttctctctatccagacgcgcagagcagagcagagctcttgatctctgcttacatactgtccggtgggcatcatggcattctaggactgtgtctggttatcttgagtgagtgatgtcactgggttctggttatctgtgtagccttgactgtagtgaggatgctgactatgctatttttacatgtctgaaaggcatttttttattatgttcattacagttctttaaccatgtaaaacaattactgaggatgaaagagaagtatgccttctctcaggctgaaactgttgattattctcaaggaaagcattttacacacacacacacacacacacacacacacacacacacatggtggtagagttctggtcaggcacaataacttgtgcacttctgtgtgtaggtcgggataaacacagcacaatctatctttattagagcaagagtgatttaaagcatgtttactgagtagtgcctggacattacagaaagaggaaaggtaatgctttcccattctccagtgccttctgtaatgtgcagacactgtcacactagagacaccgcagggacatgcttggttaagtgaaaatgctaaagagctaaaacgaaacacagccttgaaagtgcagggaaatggaacccaagttttaatggtggttgctgatgctttctttagttcctgctatgctaagaaaaacagaggctgttcttgaaggataaaggggctttttgccagtgagcacaggaaaatggatgaggctgaggagaagaaataagtgtggggacttaagcactgttattgggagtgtctgcagggtcattaaaaaattggcaatttttataaaaatttcaagaatgcagttatcctggcacttaacagtctgactcccaactgtctacttaaaaaataatacctacaatatataaccaaagatttacaaggctgttgttttaaagtgaaaactggaaagccagaacgtccttccaatggctgatggtgacactctggactagcaggcatcatcagctaaaaatagcaaaggagatctttgctgcagaacaaaatgaagttgccaaaggatcatgacataggacacttttagggaagactccaaaaacatttctttataagcacgtaattattcgcaacagctcagggcctgctactcactgtttcataatgtagccaccaaccacagaagcccattcatatgtaaagaaatacaatcagataaagtgtaaaattctgttccttgctatcctggttccatttttatgctaatttgagtttactatggctggggaccatataatcaagatggaaataaattctgaaagataataataaccaccaggctactgcatatgtggaaggccaagttgggtgacagtgggccataggaactgtagatttttctggaaattttaaatttcctcacggtggagataaaagcgcacatgatgttagataacttaaagatgaatccattggtaggatttagaaaacattgtccattttcagtggatagattaacgagagttgattggagcacactgtcttcaccagctgaaaagtaaacagataatagaaaaataaatcataccaggccatttcctcaggacctccctactgagcagtttactatcttccaggcacttaatgtcaaggatcctggccaactgcagtgaacccagagctgctctactctgggggtagcaagaacagttttttctgcatatgccttttccctggcaactgattaaataattggctgtatatagttaaagatcatagttgtgaggcctactgaaatatatattaggatatatatatatatatatatatatatatatattatatagtaggattagtatgaagcaatctctatttattttgttaggacttgtacaatattaatttcagaaaggcgctggtatctatagctctgtggcacagtatgtattttcctggtgtgtgtggcaacttgcttcagtctccaacactacaaaaacataagagtaatctcagaagaaggtcagatggctgcacataatttagcaatcgtttgagcattttcaggtcaggataacttcttataaatcactagaaagaaaaacatatgcccatttttacggctacccagaaactgaccattaatattaggaacttgatgggaacatctgttgtgataattatttaatattaattgggggcttctaccccacctttgatcattcagttaccagataaaagactcaaaacctttatgggcagatatcagccttctaagctactagtatctacttcccctcttaataaccccaagttacaacatgccatgttttgcctgggctgctcttaatgtcagttggccagccctcatggcaatattttcatggttcacctaccccatagtgtcttctcctctctccaccttctctctcttccctcttgtggtcctacctctgacttcaagcccaggaaccaaaactttgcctatctctcttctgcttagatttagtctgcaggaaactttactaaaccaatagttttaaattaaggagcaaggtcacatagtgtcacttggtgtatgtaaggatttcctcttaccctgcagggcaaccagacttgggggtcagtatttagcattgaaatgcacagcagcagaccatccaaacctcagtagcatccttccttgattaattggtagagatttaatgacggtgaactttattgataagtgtcattggcaatggctgatactacacaggaaaagcatacaccccagctgacaatgaggtggaatactgcctcttatgaattggattattttttacaatatttgtgctttctaaaacaaagcttttgtggttttttttattatgtaattagattgtcttcataattattcctgccactggggtgaaatactctgaccagtgcaatgtaaggggcaaagggcttatttgggctcacaagtcaatgttatagtctattgttgcaaagggatcacagcaacaagagcttgagacagctggtcattggtgtctttgtgtccacagtgaagttgctgagagaggtgaatgtcagccctcagctccacccaccatttctatggtgcatggtaccaatgccagcaaaggtgctacttaaaatgagtctttacatctcaaattaacctaatccagaaaacacctcacaggcatgccacccctcccccctacacacacacacacacacacacacacacacacacacacacacacacacacaaataggcctggagacttgtttagatcctgtcatgttgacaatattaatatcacaactaaataaaaatgtatttagtaattagaatattagaagacgatcaaacacaatagcaatagcagaatgcaaagaaatagcatcacttaactccaagttattgttctcattgtatagacttcactgactactgatcacggcttactctcctgtgtgtagatacagggtaacgtttttgtctatgggtcatctatgcaccatctaaggaatttggaagttcagaatcttatctctcctgcctgccacacaaaagctgactctgcataatggtctccatgggattcttagctccactgaagttggaaaagcatcatacttcttacgtccttaagctggctttacacaccttctatccagcaggatcttctcttgcgatacatctctagtctttctttggcttcataaatggcatagcaggctatctgcactgttgtcttctggatctgaggtcctctctcaccacctctatgaaggttatagttttacctatagatattaactgaagaggggagtggacgtaacttggagaatgagcatggtaatgaccacatccaaaggaagctagaacaaaggaggaactggaccaccactcaatgtagtcttggttatcagaagaagctgtttgtgtttgtccaatgtaagttggaaacacctagcccactgtgagacatactttaggaaatgtaagttcagaatctcttggagcctaaaaggccaattaaacccctgatgttctgaaaatctgttattatgtaacagtgaatatacctctctctctgccgctttactattttagaagtaaaacaatactttgattccaaatattaaattaactcaggcattgctctcccactctgtctcctaagctgtgactcagatgtcagaacgatttttttttatctagttagggaagaaattttcacaggcttcagggttgtgataacattggtaagccacctgcatataaccaaactcaaggaactaatattttaggcttttgttcttgtatatcaaagcatgttttttgatatatatatatatatatatatatatatatatatatatatatatttatagaaagcatagggagatggatcagcggttaagagcactgactcctctttcagaggtcctgagttcaattcccagcaaccacatggtggctcataaccttcttctttttccattttgtacacaaatgtttatttctcaattaaacagtccctttagaagcaaggaatgaattctaaatatctgaattttttattcataaagatgaataaaaaatgatatccctccagtagagtatgtatagtcactgtccttggtcactactggtatttactgtttaacatcaaaaaataaaagttatttaaagatcttgctactagatttctaccccctccactatgaccagctctacactgatcggcaatgttttacaagtttatagcatcagattgaagcaagtttaaggtgtgtaacagctgtagtagacacaaagttacaagatatagtcaagttcgtaacgaatataggtgtccttatcatcattgtagattcgtgggtaatatgatatgagagcattctgggagccaatgtggatggagttgtgaattttccaacacacatctctgagctgggtgacacagaccctgtaagtaatactacaacattctgcctggtccaatagcaaccctcaggccctccagagctctcataattgcctggattacatggggagatgtcgcaaacacattaggccacacgttgttcagtaagtgattcagagaaccctcacagtcaaatccataaacaccaagtggcatgtgttgtaccattgtgctatctgtctgtctgtgtacaaggtccctatccaatcctcaagtaaaggcactacagcatagtcttttctcatttcatcaatatactcaaaggaggaaatagaaggcccacaaccttctataatgggatcctatgccctcttctggtgtgtctgaagacagccacagtgtactcatatacataaataaataattcctcaaaaaaaatagctctattgagatgtaatccacaagtcacacaagtttactcattgaatgcatacactaaacactatgctatatttggtttgtttgtttttgtttttgtttttgtttttgagataggctttctctgggttcccctgtcctggactcatcttacagactagactggcctcaaactcacagatccacctgcctctgcttcatgagtgctaggactaaaggtgtgcaccaccacaccaggctaaaccgtctctttttgaggttttaaaatctaagtaaaataataggaccttagactggcatatgtaggctgagagatattaaatgacgggttggtgttcatagtgaattagattgtgggattgggaataattccctgcttttacagtgccttatgtcagtgtcccctctacacaatagattccagaggactccctataattaagtataaaattgctatcctttaaatggactctctttcaaagattattatttgcatatgttgaataattccaattgcaattatatgtcacttaatatagatatttgtattgaaatattttatctcttaagaaccagacacaaaaagaagaatgattatggtaaatgttatctttagaccatgagaagtttacaaattatattacactaactttttaaaagatcctaagaactatttccttggtaatgtgatgtgtgttgggtgaacagagatggagagatgagaaaatgggcttattggtgttgggattttcagtggatttcaatatagattgtattctattcctctgagcttagggtacacaatcgattgtgctcattttcataatgatctgtaatatatggatatgaggaaagacaataaatatttccttattcttatgcattgtcattaaggacaaagtggactcaagagtttctatgttgtgatacaaggaaccattagggggagtttgtagatctcttaggtttgactctaagatacttggtgatgttttgatgtgcatgaccttgaggaagagataaaacttttcttttataactagctctattaacctcagaacgtaagtcatagtgtctgcttccttggagtgctaatgatggccaaactgagtgatgaagggtcatgctgacgtgtactcatgcttcttgcacttctgcctcgtggcctcttcagtgattcagtgggctagggtggatactcttcagatattagatgtttgatatgggatattggaccattgagatctgccagttaaaatgcttgattattccttccactgtgggagtaaaaactccgatatcataaaatgtgataatgttataggttttcggaccatcaaaacccagcattatttttcatgtctaagtagtatttagaagggtcattctggagtttgttttagcaactaggagtggttatccctcaaagtcttatttaagtagatgtttcaggaggaaagaaagcaacactaatttaaattatattgatgtttttccatcagacatgcaggaatcatgaatcatgccactttaatgttgttgagacagtgttctatacaatgttaacttttaaacaaggtgacacttatctaacacttagattaatctgggaacattcaacaggcttgatcatttcattaaaatgaaccaggactgcactgtatagcaaaaatataactctaacgtaagtgagcgcatgcattcatcttgatcaacgacttgtaaataccctgaaaatggtagcaggtctctgatgattaactaggtgggccttaattagtggtatgtataattgattatactaagaaatatccaatcaatttgacttcattatttcattgtgtgctcagataaagccaatgcgcaaatctgaacagttagtgcctcattaactgctttctacttcataaatttacactgaacaggaatggacttcaaaatcatcattttccaaattataaaataggttgctatcagattagccacatttaaacctcaccatacattacctacccaactaccaagttcttttcttctcttttctcttttcctctttctttctttctttctttctttctttctttctttctttctttctttctttctttctttcttctttctttctttctttctttcttttccttccttccttccttctttcctttctttctttctttctttctttccttctttctttctttctttctttctttctttctctctctctctctctctctctctctctctccttccttccttccttccttccttccttccttccttccttccttccttccttccttctttttaaatttagtagagtctaaaacctaacatctttccctccttaaaccactttctttgtccaggctggtgctagcctttccatgtgcaatgttttaacttttagctcaagtactgcttcatattcatcgttctctatctgtttagcctttctacattctttttatcccgttaaactactcattctgattatgaatttgatatttcacatttactttcttcattggtaggattgtagataccatttatttttagatagatatttttaatgtcattatggtgaagccactggggaaatagctgggaaaaataaaagtttcagaggggaaggaatggggcgacagaaggtgttaggtgagtagactcatagttcgttctgtatagtctgaaactgagagagagagagagagagagagagagagaaaggtacttaggttagaggcttggctcagctgtgatgagcactagctgcccttctggagagagccagggttcattctcagcactcacatgacacctaacaattgcctgcaactcctgttcctagaggtctgatgtcctcttctggcctcaaaataaaatagacaaggaaagaaggaagggagggagggagagaggaaggaaggaaggaaggaaggaaggaaggaaggaaggaaggaaggaaggaaggaaaaaagaaagagatctctgccagctagcctagatgctgaacacttttaaaagttccactccacagtgtcctgctgtgcttttagagaaagcgacattataattgtgtcatagtaatttgtagtgacatgaactctgaatgtagtaaatttgtggtgaaagtttaagatggcatttggcaaagtggaaaactactatgggctttaattaaaatggcatcacattaaaggagtatagctatatagatggggaaaaaaaacactcaggaattccacctcgagctgccctgcctccacaagaactccctgacttggcaggagccacggtttgtcacagtgtatgttctgagtgcagccaaggttacatttgttgttaactagaacaagaattcggggcacttaagggcccattattttccctagtagtagccataattaatttaaatatcagatcagctttcttttcaacacagtgtggtataaagtcaaaataagagactacatcgtaggcacagatttaaatccctagtatatcactgctgaatgataatggcctttggccccatggtcctagccatataatagtggtcctctgggatgcctgtaagaattaagtaaaataaaatgcaaaattctaggcatgtaactgatatctactaaatacaaattttagttatatggactactcataggatgctcattctgtactaagtacttccttactgtgtgtgttcatgtatgtatgcatgtttgtacatgtgtgcatggtatatgcctgtgtgtatgtgtgtctgtgtgtgttatatgcctgggttcctgtatgtgtgtgtgtgctcatgtgtgtatgtatgtgtgtgcgtgtgcgtgtgcgtgtgtgtgtgtgtgtgtgtgtgtgtgtgtgtgcttgtatggatgctggagattgatatttgttgtgttcccatatctttctccactttgtttttttgaatcagggtctctcattgaactttaacctagagcactctggctcagcaagagtagcaggccagtgagcacaagggactcctctgtctctccctctgcagcgttaggattgcctgtgcacactgccataattgacatttatttactttttgttttcatgtgagtgctgtacatctgagcacaggtcctcacatttgtgtggccagcactttaccagccaggccatctctcctcccccggatccttgatgtatttttctgcaaaggtttttatgtagatgtggttgctaccctattttccaaataaaggactaagtcaccaaactaatagagaaaacacagaagctagggttcaaatcaggcttttctattgcaaacagagcccacaccctctcaactattattcagcatagcctcacccattctggctatttccactgagcacatcccgtgggccatttgaatgcagtctcacttcaatgcgtatttacctaattaaaacaaactggggacaagcaaacaatgctatttagtcaagtataaatcattttaatttgtccattcttttgaatgggccacatcattgtttcctttcaaccgtgggaaacccagcactcacctgaatacagacaggcacgtttaataagtcccagaaccttcataaatcgtgtcttctttgtgtgacagtttgtgaataattaatgaagcaacatattttggagtgctttggaaagtatcctaaatatatagaatagtttttttttgaagatttaccaagaggtgactaggaaagataaatgctatctgctgttccaagcatgggtgctagtgatgtcatttaaggatttcacctatgctcaaatttccacttgctgaaatctaaggccttgtttggctcttatagtgagtatagtattttcagacaagttccctagagctaatttttaagagattccatgtaaaaggtaggttgctgagtgctcttgttggaagagcgctctctgaccccaacattattatgcagaacatcaccattttgtccaaatgctactcagtaaacgatttgcttttcctaaggcagtgatttttaagtgcggtttcaccacgcagtggggttttcctagtagatccaagagagtagcagagaattctcaaaacagaattaagtttttatttctagaaagtagcacataatgcatcgtttggagaattcgaaggagtaggggtgactcgcaggtgcacctaaggacagcaattggtctttgaagataccctcagtcctgcagctacccaagaaccaaaccaccccccaacccacggtgctccagggcagtggagattggccaacaaccttccccaggcttggtccatgtctaaccacaaggcttggtgaggttccaataggcaatttctcttctagtttagctaaattgtgatactcaacagtgagccctgtccttatgcatggccacgaagggccatttagaagaagaccacagttcaaataatttacttttcttaacagccttatttggggtcactgaaagcaagaaccaggatctaggtgtgcctcaatgtagtgattttgccaacagagcccatgattgctggtaataggtcttcatttggtcactcagctcaaactatctacttagaactagccctagtattttgtctagtcctttttctgtaaaaagtgttgcccttgctatctgtccttagaattaaactccctgagggcaagggcagtgtcaagctatccttcattcatatgcacacagtgtgtgcacaggtttagggccagctagtaggttatggaccataatggattttataataactttaggacctcatacttttgtgtctttagggttttcttcatcacacatgcacatggttttcagcatatttttctgtatctgatgagatggttttctgagtattctggtgtaattttctaagcattgtttttttttttaatttaaattaaagtaaatttcttgagggcaagcactgtacagctatacagccattttatataactctagatgtagattttttttgcttcccatcttactttatataaataactatatatgtatatagttatacacacacacacacatatatatacatatatatgcatgtgtgtatgtatactttcaaaataattattatagtcacctgcagcacatgtaagtagaattaatatgcatagatgtttgatttttatttcactgagaaatgttgtcatttaatgttgcagattgtgaaaaccttttatatccatagcagtgtttctaggggtgaattaagtaaaacaaaacaaaacaaaacttaattcttcaaatttcaatctttggatgaagtattcaaattaaaccatggaatgtgtgtcctagtgaattgttacaggcaagatgggtggaggtgaattgttacaggagagattggtggagtagctgatcttaggttttgctgaacagaacttcagagcatcttttccgtatctataacatttgaaagtcaaagactttacttttaaggggcaacaaggctggggagaagtatggacacttacagttaacagagactatagaactgtttcataccgcctcacagccccccattcccaaacattgtatctaattatttaaccctccatttggggggagggggctggaggtattttgtagctcctcaaagaggtattgttttttcaagtgtaaaataatctgagatcccccaaaagtcaccagggtgctagagatagccctgtgccagactcctgctctttcccaccattccaggagccacacaacacagagagttaatcaggttttattgcttgcttccttgtattaacattttcttcattttaatttactcccttccggtaagaaaatactttcttttctttattttaaatcttctctaaataagtttattgaagctatattttccacaaattgaaatattcttttaaaagaaattatgaaaggcttgatttattttaccctctcgtggctgaatatcaattaaacataacataatgtaacaattgaaaccttacttctttcttttttttttttttttaactatttctgtgaaaataaccagttccttgcaggaggaggcaagtttaactacaaagagattacaaacaagtttgtgggtctgaatagtgttgcttggtgctttgaaagaaccataattaacaaggttgtaaaagccaacagtctctgttcacgtccttcctgtgtaactctctggaggggggagtattcgcttatgatttgtctcataggatacatcagactgaatttagaagcagggaaccattccttcttgtctagctactggatatttattcttcccttattaaagggggaaaaaaaagaattaagaaagaaaaggaaggaaggaaggaaggaaggaagaaggaaggaaggaaggaaggaaggaaggaaggaaagaaaaggaaaggaaaggaaaggaaaggaaagaaaagaaaagaaaagaaaagaaaagaaaagaaaagaaaaaaaaaagaaaaaactaaagcactagtaattttcttttatgaatgtagaccatagggagataaatagcccctgcctgcctgagaggaaggtcaagttccaagtttttctttcctttacattcaggaataagcaaatggaaaggcaggccaaacagaggagtagcaggcgtctgatggttaagccctccccccaggactttttatgtacataagcaggagtcactggagcagctgcgccgcattagttccgatagtttaacaggctgctctgcaggctgacaaaagccgagctagcgcggtggcttccctccatgttcccgagcctcccgagctctgctcgtcaagtgatctttggctggggctgggggaggagggtgacgttgaacaggcttcggcgggggagtgtgctcgcctggtctacacccagcagcctgcaccgagagactgaggcaggggcggaatgaactaacagcagctggatccgacctgtttccctggacattcctcagactccggatcaagggactcactggaaacaggccaggcaaccacgttgccctggattgtggccaactgtacaaagttgaccaggaaaatggctcagcagacgacaagcccggacacccttacagtccctgaagtggataatccgcatgttccaaacccatggctcaatgaggatcttgtgaaatccctgcgggaaaacctgttgcagcacgaaaagtcaaagacagcgaggaaatccgtttctcccaagctctccccggtgatttctcccaggaattcccccaggctcctgcgcaggatgcttctgagtagcaacatccccaaacagcgccgcttcacagtggcacatacatggtaaggtctgcaccgacccctgaaatgttagccataccgtatggttcagtgatttttgctcctcctgcagccttgggggtggggaggaagatctctattccactcctgtgatttatcggaagtaatctacctccatagtatgtcccaccgatgcccaagtcagggcaggaatcctagagataggtaataggagtggttgaggtgggtggttctaagagctcagtctctattgcaagttcctacaagaaaattggattccagatgtccaaaaggaatgtaggtttgctcccatacctaagtagtggcgtttctttgatttcttatgctaatatccctaccaggttctcctaattggaccagaacagaggggaggctcctcacacttagcgtctcctgagtgatactccgtgcaaacagagatgctcacagtagtgtgtacagatgagcccctcccccccgccccccaaactgcctccagctttattgtgttgataattttcatcgtgccttttcagggaagaggaaagggattaggaagcccgcaggaagtgatgggcaaccccttgttactctgatcttgtttttcttgaatttgaatgctttgaatgttttgcacttatatttccttcatgaatattttatcatctttataatgggtgaggttattttatgcacttgcttccatgttttgtttgttttgttttgttttgttttttctggaggactttcaatattttcttgctcttgaaaatatcaaatattgaactgaagccatggggcaccttcctcggagtttctgcctaagaataggcagtttaagtcttgtgtctgcaggttcctcttctgaggtctgtggtacagggctagttaactttagccactccaaggcattatacacgtactatgtctacatttggataaaaatgaatgtaaagtatgacatattttacataacaaaaagagaggaagtgtgtgagatggggaactaactctataatttctacagagttttcttaacttagccagtgggtctgagttgaaaaaaataaaaacaaagcaaaacagaaagatgatgcaaggaaggacgcagtcacaaggggagcccgatctgagtgacaagcttgtattcagtgacagcacagataaaaggcatgtcacactcaaagacacagccaaccccagagtgttcattttcaatagctaaacggctgactaagtaggagaacctgttgtcttctagatttttaactagatggcaaagattcagttccatggcacctagtagtcatacaagggataaggcaaatgttggatttttcagtgttaattttttatttatttatttatttatttattttggatctggaaaatgatgagtgttcctctgaggaagatgtcgttggataatttgtcaacagtaagcagtggatgagagagaggcaggacaaacagtgtatgatgctgggaaggaaggggttggctcaagaccatgcactaaggaccaggcaggaaagccagttaaaggtctcatagaaacagaaccagcctttgggcagcctctgtgcgctttagaattatattccctaagattgtctgcattgctgacagggtaggcttcactcaccgcttgatctcagactacgtgaagcagcctagagttcatctgaaggttattggagctttttggacatgttgggtatacggaaggcaggaaatctcatgaaaacaggctttcttctgaaatccactgcacttccttttctgatgctgtctggaaagcctccaagcacatggtttctactagtattcctttctggcctatccgctctcagtcagatcaggtggcattaaaaaaaagccagggaaatggaaaagatatagatgctattgatccttaattaacttaagaggaaagagtttccctcaggaaactctgggaggtgcaaatagcacctcaatgttttcattttgtttcagtggagcccaaggctttcagccatgccacaggtatctgcagtcaaccatgtcatctgagcttcaggctttgcactaagcacaaggcagaatttcttttcaattattcattcataattttatttatgagcatgtgttgtttaagtatacgctacagcattttaagggtgtaacgcaggcatgcacacacacaaatgtaatgggtatgtaactgtagtcagacttcctacttccaaatgcttcgtatggtcctgcctcggaatgttggcccctactggtggtatcctgtccacttaatgcatgtataaacagtatgcacttaacttggatgtttatatcttatgtgtaatggttaggaagttgaacaagcattttttcttggttctaagtagtttacattgtaattgaaaaaaaaatatggttggaaggcatgtgtttctgttgtagagcttgttgctctataaaaccgcctcccagtctcagtgcattgactcagtgtgtagcatttactcacttcagcctttttgattctggtagagggcaggttgctttcaaatgatgaaggggcatgggatcctaccatcttgtggttctcttgctcaagacagatttctcaaggttgtcaaccaatgctgaataaggataaagaacatgaaggatggcaggagtgagtgcttacaaggcaagtccagaagcacacagaacacggaggcttgtttgctctagaactcagctctgcactcacatctaattttggggctcttgtaaacctctgaagtaaggatcatatcaaaacaatacgtttgttaggtttgttgaatggaaagaacttgaccagaagtagacgttagaagtgagtttggtctacactgctttatgttcctgggctggtcttgagcttccaaccacctggccatgaatggagcacacacacacatacacacacacacacacacacacacacacacacaaacacatacaccagttaattttaaaatgcctgggctaaatctaagactgtgcactcctaaacctcctgctgctaccccaggcccaatggggaagtggccagtgaaatctcccatggctgcttggctctgtttcctgcagctcttatatccaaccatctcccaccacttcctgccaaacctcctctccccctgtgtcctagcctgcccaactctaaagatcccagcctgtctccctttgcccagtcattgaccactgacatctttattggtcaatcaaaatctaattggggacaaggacctttagcatttggacacacagatttcccattgaatcaaaacattagaaccagtctccaacagtagaccttccttatacctgccaatcagtgtaggatgccttcagcttgaatgttaggtgttcgttttttttttttttttttcttcttccttttttctttctttcttcttctttttttaaccttctatattcaacacaagggccattgattaacccaccagagagccagggttctgttctactcatcttgaaacatccatacttcatgtcatgactggccaatagtgaatactcaataaatatctcatagctagagtgactgatcaacattttagacctcttgtaccttttaaaaggtctcctctttagttccctacgcaccccatttcacctacctgtttcctgtgtttaccaagcacatcttcatttgcttttcctgtccatttaaaatgcagcttacacagttgaccaaaggcccgaggactatgagacttaaacaggcagcagctaagctgttagaaaccaggcggcgaaaggatccttgcagttgaatttttgataacttgcttaacatatactttgatctccctgcttcccaatttcccaggcatagcacccagagctctggttttctctatgataattatgtgtaacttagagtgcatttcatggggagagatgcttagtaagcatggttactattatttttattccatgcactaaatcctactcatagctttggtctgcatcacattcaggatgatgtttatatttctagatggctataacttgtcacttgtttgtccatagagtgaattaaatttgtcttaatatttagtgagtgagagtaatttattttttaaaccatgggagaagagatgaagaagagtattattgctggggggggnnnnnnnnnnnnnnnnnnnnnnnnnnnnnnnnnnnnnnnnnnnnnnnnnnnnnnnnnnnnnnnnnnnnnnnnnnnnnnnnnnnnnnnnnnnnnnnnnnnnnnnnnnnnnnnnnnnnnnncatctcttaagtctttgctctctgagagcttcccaacgaaaagtaatcttgccctatttagatttctgtagcagtttacttttcccactctctcaacaattgctggtaataatcgtatcttgaaacatcagcggcaatttcctggactgcctgtgtgtgagggctacaactttcacacatccatgcttgcctccactgtttcacagattgaacttaacatatactatattccgttccctgactgtacgtaggattctgatttcatcttagtagggagtttcctatgacatcatcaggaatgccacgtctatggaattcccaataaagacaaccaaacacccagtgtcagtttatttcagagtaaccagtcaggaaattgtgttcatagttttggggtttttttctcacttagttttagcacatttcccttatgttaggcccaagtagggcccatgaaggaaaagaactgctgattcctgtactggggaccttaaaagtcagtgttcagccatgattaagttacaaaacctgtgctctttctttttcaatttctgtgggttttgttttgttttgttttttatttttgagacagagtcatgttatgcaaccaagtctggcctagaactcactacctagcccagtttggtctacaactttcaatctttctgattctaaccccctgagttagggttaaaggcttgtccggccacatccagctcatttctcattctgttcagatggtgcttaatagtaattatgcccacttttaagttaggacattttcctctgcatgcagtataaacccagatatccaccattgagagtttttaaatgtcatcacttcatcagtatttgcttatggtctccctacctcacagtgctagggacaacacccagaatcccctgtgtatgtagctctcaaaagctgtttcttaaatttatatatgtcaaaaactaagtaaagattttctaagatgaataatgcgatggagattttccttcccagttgaggactagatggtgtgttacacacacacacacacacacacacacacacacacacacacacacacacacaagtgaaaggagatgttatagagtgcacagcagtgacaggagagcaaaggccttacctttataagctccgtgtatacacatgtgtctttaattaaaacatgttcaaaggaagaaatacttacaacagcttgaaataataaagcacattagcattaggatttgactcattgacgtgcctctttcaaaggcttttgtcaaccaccgaagctttgtaaggagtagatgacacagccatacttatttattcatatagtttcttcattaggtatataattactcgtgattaaacgtgactacttactcctcggtcatccttcttccttcagcaactgaaagttcagaagttcctagagtgagatagatactacgaattctattcaattcacaagagagggaagaaattgtcacctctaaaggaaatgctgtttcttttagagtgtagaggctaaacacacataagtagggttttgaaagctatgactatttttgaagactgtggactttctttttctacctcttgtgtttagctctcaggctcctgctctcttctccctatctctcatcccccaacatatggagagactagcattattgttgctctccttgcacgtaggagcttgtgtgaggacttcaggtgaagagtgatactagtctgggatgtctaaggaaaaccatagagggaacctattaaacaccttggccatgtttcaagtgaccatgtttgaagcggccgacatctcagacgtcagctgtgaccctgctgttttcttagtgtctttagcttttgaagtgagcatgaaagctcttattagctttcattaaaaccggaagacttcagaaggacacttctcttgtaggacacagtaagtgacccagaatatttgctgcattacaaaaatcaaaaggtgacaattatttattgagagagaaaataaggaccgatggagccagctcttacgacccctatgtacttcctgtgaccataactatttatctgaatggcggagcctgtttttaaccagctgaagctgttgcagtcatgatgagtacgccatccaaccaaagcataggcttgaaaacacaaggccgaataactgaggagaaaattttttaaaaagatcatttgaacaatgtaaattataggtttacttttttaatttattctttgcaaattaaaaaaaaagtttagttcctgggacttcaggtgactagatgaatgttgccactttgtaaattttgttcttaggcgaaaagctatccatattttttcctagagtagctgcctcaggacgaagttaatccgccattgggaaaagagaagcaggattttacaaattgctttactttggagaagaaattcgtgtttttaaagccatggctgacttagtagagtgggagcttagcatttccaggcttgctggccacctgatgaccttggtcattcaacctctcaagtaatagtttccctaattcagaagtcttatggctgcaaagatacatggtatttacaaggtaaaaaaaatctataaaatcactaaaatctataaattgataacaaactacattttaagatatgaagagcaagtcccagagccagtggctatgtccaggcatggtaccctgagttctatcccagaaatctatgtcaaggtagttttttgacccccacactcttgctatggtttgtgcactcaccttagatgctgaggcataggcagatatcacagagctaccctcatgcagtggcgtccaccaatgcctcttcaccatttacttctcctgatattaccactcttcagactgtcaaattccactcacatttctttcctttccctacatgtctactgagactattacagaggtaaggattctatagaatggcagtgagttaatagaaaggcatctgactttatttgttataggtgtggtttgtaggaaagttgtcatcttttatttctggaagaaaaaaaaaataccccaaacaaaaaaacaaatgtagccagaagtaaagaaggacgccaggatcgatggaggatcttctgattcacagtggtttttaaataacagcagcttaaacacaacgccaatcagaataattttattttgaatgattcagagaaagaaagcataaaaagcttaaggtctggggagaaagatcaagtcagaaatctattaaggtttggttccctggttcccaaagagccagctgggaaggatggtccacagactcaagttactaagcaacagagctgcaaactgcttggtaaccagatctggcctgactcacagtctgactgcgtgtgactgtgtggccagataggaagactaaggtccaccctacctcacaacaattccttccatccccctgctattacagagcatcctttgatgtcttttttttttaattaaaaatacctcttagccccaaaacaaatgttattgtttttctttaaaacgttttattataagactgctgttaattggtttaatttaagtaaaatgcaagctttattgagaagaaaaaaagtaaagagatttggctgtttgcagaccttgggttttcatgggaaaatgcagactgggccatagctcccttcttttacctgctgaggatttccttgaatcctcagacacagtgtggtgtcatttgtctcttttcgccatgacttctgctatacctctgagcatagtttatatagctgggtggatcctaaaaggttgaacttcagtatgcattagtctttacatctgttgtgaaaaataggtgctacctattggtggtctgtaaatatttgtggtttgagcaattgaagaccagataggccattgctgcccttcttacactgaatatcccgagggatccacaccctaagcctgggagacttggcgatactgtattggatttccatagtgggaaaatgtttcagtctcaatgattaaccattcctatggactttgtcactaagagtgtgcgtgcactcacagtttatatgtatctatatcagtatagtttgacattactaaacaggatagtgtggtaataactggtcaagtgtatgcatgctaatattttcttcatcttttgagaagaatttttccctgtcatattcctgaaaaaaataaccctacataaatatatttatgaatcttgggaaattccttaataactagctggttaagctccgatgactaatccttatctctcagaattcataccagttaaattatacaccaagccctaatcttataaaagaaatgccatgcttttaaggaggaatttgaaaaggcagcctccatatttccttttttaggatgataatctggagacatttgaactggcagctactgagcccacttctacagctgatcccatgataactaaatttaaataatgaaatatatttaagaggtttattgtagggatatgattttaacataaacattttgcccgttggtcaataaatattcattttaagctgacaaatttcctttctattgccttcatgagatagccctaaaatcaaattagctattattagaacaaagtagcttcctctttatatagttattttcagggcattattttcatttccatacataccttattttatattgatgtttacagcggtaagcatgtatagtagacctaaaggcagttcccgtctgactgaaaggctgggtgtttatcttctctcctttcttacctccttttgtttacaatatttgttttactttgccttattctactccatggcttttttttgtttgtttgtttgtgtatttttttttatggccttctcttgaatgagtgccaaatagaacagcctatgatttatgagttgtaataactaaaacatatatgaataagaggctgatgatgcacaaggcgagcttctatggctcttttctgaatagtcctggctcactttaataaaccatcttactaataacaatgacagtggcactgaaggccttgaccagtcgcatcatcatggcttaagactcgtctacgtttgtatttcatattgtagcagatttacattcttgcctaaatgtccttatgtttcaaaaatgaagctttcccatcactgttgtaaactagaaacaatgtatcatacatttatatgattaaaaaatacattatgaaaaataaaatagactcatggtttagtaaacagtaggaaagattggtctgttctctctataaagtggcatttagtgagtaatatagacatatgaaaaactagctgggtccttctccttaaagcagcaagaataactgaaaaggatttggaaaggaaataaccttcctattattatttaatttcctcttttaaaattcaataatccacatcagctatgccttaacctatcctggtctgactcaagcccaattaaggtacaaatctagtgaccctgcaccattaaaactttcagtctgagaagagaggcctggcaggttctcttcagggcttaatcacttcactgcaagtgaacacattgaacttgaactgggcgaatctgagttttctgccaaagcatagcgttggaactctacttctcaattctgtaatgcgtaatttccaacctgggctttgcacagagggtaagaagcataaaccagtcctatgaggagtgctatgctgacagcagccttccccattctacagacaaaggcacacagggatgctctttcaaagttgggatctccaaacaaaagcagtatgacatagaatggggaggaagtattttcagttactctagaatcttttggaggccttatttctagaccacagtattcacaagcttgctgaagctacatacttttcatggccaagatgaaaggaaagctggtgagcccctgttcagaaagaatgttacaatttcctccctggcaacatcagaatattcacctgagactgagatcctttgcaagtatgttggttgtgcctctgaagtatccttatacacacagtaaggttgaagcatggtcccaaaagccacggattaagatctccagcagcagccaaagccaactttaaaaaaaaaaaaaagaatcttagaagaacatctagattcatcacttgcttcccttttatagtgaggataatgttgtacatttgacttaagacaatcaaggctgcaaggaaagtcaacagggtaccagctatctaagatcaaggagagacattacccagcattcaccttaaggggtggaaatgagcaattgtatacatatgtagattagaaagaaactttgccttgacatttaaagtcatttattgctatgccaatatcagccatggcaatatatcatagcagacaacatctggtgtctataaccaggcatccttcagaaagccatctcatttaacaggtcaaatgtttctgtcagagatctttgcaacctctgttggcttcatctccagcataatggctccaatgctctctgactgtatttactgatgctttctatatcataaacatctgaccactgacccagaaaactttcaggtaatttaacaaactatgattcgtagacgtcaagtccctcattccaaacccacatgactcctctgggtatttcatctttgaagatccacaattgccttaagtttattgtatgcaaaagcgagctcaatgtttcccgttttctgatctgtctatttctattcatagggatgctatttcgtcaaggaatcagctagactcaccattgacttatactttggtctctctctcaccaaggctcggaagccattgcatataatagcacttcctgttgcttcccatttctgctatgtagtctgacatttggatgaatcgttttacactgtcagtcatcttagtgcccttagctacttccctttaggatgccctgcttacctgaacttaagcatcagacgagaacttagactattggttctcaaacttcctaatgctgcgacccattaacatagttcctcatgttgtggtgaccccccccaaccataaaacgattatattgttacttcataattgtaatttttctaccactctaaatcataatgaaaatacctggtatgcaggctataggacccacagttgagaaccaaagtttttagctctaggacctacgttgtttctgtggtaattccttttctctgccattgcagaaccaaataggtacacataccttcccaaaaaaaaacccatccttagattattctgaatttgatacactggctatagtttgccaatcttacctatagactgaagttcatacattccagcctagtattcaagtcttacccataattccagacttctctctgtggatgatcagtggtctttcctatgggcctttcactgtttctcaagtatggccaatgtagacaatacagataatcaagccaagacaatgcactctcttagggcctctcctgtgtgtcgtaggaggttcagatcacaatgctctgaaaatccaaaatgtctccaaacattgtgaaatgtccacagggatacaatttgctcccagttgtgaatgactgacatataaaaaaactttgtaaaggaaggagccagttcatcccacttaaaagtatatcagcagcacctaacaaggccttgttatccaggaagtagtctagaacacttcagtgtagactgatgctggcaactcactgtgaaattctgggggtatcatttaagccccacaaattacaattgatttcacctgtaaatggaacttttaataattcttgtgtttcatagaattattttaaagttcaaatgggacacttaacttaaaaaaaagaggtaaaaaacaataaaaagctactaaaataatataaaaatattagtcataacatactgagcatcttttgagcctgttgaaatttagaagtaaaattccacttccatgtcatttttgttctgtgcacattgctttttgagatgctgtttgggcatatgttttctgccaaggattttgatccagtaaggtatagattacggttactcaaaatggcataatgtggtggatgcacaagactacattcaaggaatcataggagttgacaggataagcttcaagcaattactcgaggcttcatgaataggatggggtaggtttaaagacgtctgagacattgtgcagacatttatctgatctgatctagcttcatatttatggaaatctaataagatttgtttgatcagattttacaaagaaaagactgggccctagaaaagcatctgatagaggccagatgtgaagcccagagggactgcagcagggaaagaatggaagtctgggaaaagaattgatgtgggaccatctcacccagggagcagtatgaataaacaggcacgaaggttccttggtgtttaggtgagctgtgctgtaggctggaactaggttataagagaagctggtatctcccctttctttctcaccacctctctctcttatgtacccttctcccgcctcccaaggaggatttatgggcttaaagaaacatgatcacttttatcttcttaaagcatcactctatataaaagagagtgacattttgagttattaccccacagtaagcttgctaagccacaagtgtgcgtattcaatacgttcagtagttccaatgtgacactaagtccagttaaaccaatctaaactatctttcaactagatagtgccctgctaccgcttctaatcaatccctctgaaatattaaaagactcaatcgcatttccatcagaatcagatgtattaattctactgcttgcacacatgccctgttgcattggacagaggcattcttcagatgtgaaaagagggccaatgcttttcttttactaaattgcaagtttattgattagaaaacccttggcatttctgagagaacatacgtagaatgttcacttgctctgaagccaactctttgtttcaagactagctcatagtattgaaagttaaaaactaaatagcctttcacctatccaaaatatcatttttgagtttctaccacatagctattactcttctcaggtcagagcttcatcaggagacagagccttgcccccttggagtatatactgtaatggtgaagacagcatacccataaatgttccagtggaccaaagagtggcaaatgcaaccatgaaatataattaagtgtatgcagaattttagacaagatgttttaggaagactttctatgaggtaacatttaagaagcgagctgaagccatgattttctaggagaatagtatttgaggcaggagagagagcaagtacagagtccccgaaggaggatgtgattggcatatttgagggaggaaaagagctgtaaaaatggggctggagcatagaaatgaaacagaccacatagcattccgaggctgcgttaggacttgggatttcctaggcgatgactgtgatgcatcactatgaaagagttggtagtaggagtgtctgcattggattgggggaaatacatacatatcttaagttttggagtaatcggtcttgttcttgtgtgggaaatctaaatgctgaggaagaggaggaaaaccaaaacccattaagagactgttggaataatctagatgacagcatcatagtggtgcggcctagagtagtaaagatgtaagtgctcaaaactgctgaccattttgtctgcaactaggaaggaaaggccacagaattctctggccaatttaacagcgagaaagaattaagaatgattatgtttgaggcccaagtgataagtcatagctgacattcatggggcttagaagatactgggcgacacgtattagggaacgcgatccaagaagttagcgttacatttggagtgactactgggtttcaaagtacaagatagtcacttagatcattgtctctatgagtccaaagtgcatagcaaagattggcacaatagagccacgtctggaaatcattaaaatacagaggtttttgaacttgtgagacttgcagtatgactgcaccgcgaatgtgtatgaatagagaaagaaagactggtgacagctggatacttcaaacattagaaatcagaagatcacagaaacgcagctgaagaagccatgagaaggtagcagaagccatgagaaggtagccagtgagtagaaccaaaaccaagagatggtggcagaccaaaatgtttggtggagaaaagtgtgatgttagatctgacgatacttatgagcggctaagatgaaggtcagtcactgagcatgaaactgggccagtggcactagtgggggatcaaacggtgatgacacaaggccggaggactgattgtttcacatcttctcacctctctttaaacctcagctacgtatttcttttttcaagttgatgggcttactctttcagtacagagaaggagcaactaaaacagaccattcagctatgcctgccactacatccaccaaactgaccatgcaaacttccagaaccttctactttgccattctgttcattattatgagtggaaaaaaatcgttattctcttggatagtaacataagaaatcactccagaactgaaacacttccttactgttcagcccgaaacaatttgtgatctcataaattatatggtagttaatagtcaggcaaccagcttgtcagataacggcaatattttgtagtgacctgctgaggaaggcttctctaggctatgacatcagttcctaggatggtgctgtttacaggctaccttgtttttcactagttattgacagaagactttggtgtctttctttgtggacttcttcaaaaggttgagtgtcttgatgttagggatcggactgagggatacaatagagatctatatacaagtatcagtgggtttagctctttctaagccctcacttttcttactctctagccctctttttctctttccatcccctccccccaatgtggccatggccagtctctccctctttctaccttctctctttctctctgcctttctacaataaagctctaaaactacaaaaaaaaaagaaaatcagtggtttagtagatgtggtggtaagcatgtctgaatggtctgttttagttgttcatactttaagataaagtcataatgatcagtttcaccaggacagaagagatgatattgtggagaaatatgtacaattcacagaccatacaaggacacgtacttgactgaagtagcatcaaacttaaaattgctgtagttgttcttttcctcaactagtattggtggtttaaatataagcccagaatcagggaagcattggctatagaacctgcttgttggtatacacttataatcgtatcactcaggagatggaagcaggaaagacatcagtcattgtcagcctgggctatataacgagttggaggcttggctaggttatgtagacaggttacatagaaaaaagctgtctaaaaaggaataagcaaaacataaaaacaacgaaatttaattgagctgagacgctctcgttagatctgaattgaagggttcgcaaagaagcacttgtgaggactcccatccaagtttattctaaacctgccaaaggaaagggacacagggttggttgacaaggatcaatatgggcctatagagtgaaacttattcaagcatttgatagattcagaaactttttagagtcggaacactagagagaatgagccacaaagtacaagcctggaaatacccatgaagtgattatggtgtaatttgctggcaatggtgacactgtatatggctatgaaaataaggtcacaggtcctttgtgtttgttttttgttttgttttgttttgctttgttttcttctgaaccagatacatgatcctcttcttgagagtgtaaggctacataatgagggtgatggtggcccagaaaggggcatcaagggaggcttcgagaagaagtcacaattcaattacatcaggtttgtgtgggagagagtgccaaatctctcagtaatgaaaaggagggtacaggaatttctgtgaaactcttgaacctaaatgtaatagactgatcatgtgagtttaaaggaagctttaggtcacgggagagataagtcacagtctgtaagctgcagagaagtgtgaaagccatctacttatccatttatctctaccggacaggagggccaaactgtgagtgaaaagatagctactctatcagattggtgaaattggtgattttttaaattgtttttatttttaattctctctctctccctctctctctctctctatgtgtgtgtgtgtgtgtgtgtgtgtgtgtgtgtgtatacgaactggtgagtaattgtaagtgcaaacacgcatggaggtcagatcctcactggagaggtcccctctgatttgggtgctagaaactgaaatccagtcagatgtgagagctcttaactgctgaaccatctctctagtcctctacattgaggtccataatggtcaactaggagtgctggagaaagagtcagaggagatactgagatgcaggagacgtcactgatgttagcctgttgccgctcagaagtcatcctgcaatgtgtaggaagaccaggattcacagagccttttgatggtgagcaaccacctggcagccttggagttcctaccgtgacaaataggccatgtgtgttgaaggagcaagtctttcctttggtgaagtcagtattctgcttctatctgttttcattcatttcaagcagtgagaaggggtcggactccggatggctagccacgtgcagccgtctgtgtggtcagcatttcatggagcaaagccacatttcctcctcttctctgctatatatttatgttttagagatgaattacacaacagaaggtgcggggaagtcacttggaaactgccagtttccagatgtgtggccacagggtaaatttgcaaacactgaagattcctttgtgcttgttttttttttttttttttttgttattgttttgttttgctttgttttttctgaaccagatacacaatcctcgtcttgagagtgtaaggctacataatgagaaactgaacacacacacacacacacacacacacacacacacacacactgatatatatgttgtacttgctgcatcaatctatgcaattagaatggtgagactgcttttactaaatgaatcaattttatgtgttgtaaatatttttggaagacagaatagcaagtttgtgccacatcttaacatacattcaaacccttttattatactagtaagcaaaagaaaacctgtaaaacctaacagaagatagctttctctttgaaattcgaatggctgggtttgtactgcctgcctgtggatctgggttatgtgaggcggttgctgttagggaacaggctgctctgtgtctacggaagagtgggctctacaaagtaactcgcacacacctccccctccctaacagaaagggtgagccctggcaccttttaacctgtagggattatgtagccctggctatgattgattcgttggcttgcctcaagaaacgctcctggtatgtgttatgtgctaaaagagccaagctttgctgatcagcacgtcactcccgtgaagacgtgggcatgcttttgtgcatttgttcttgtagccctggaggcatatttcaacacactgtccagaattggctagaacatgcctgtcactcccagctgactctgatgacgctcttgccaacgtagatttacatcaacacagttctttactggaaaaagctcttttagaatatacagggtggcccatttaaaacaggcgcagtatgaatttgaaatggaatgatttttagaagatgtgttataagaaatgtactgacagttggagactctacacagcatagagctataatgagcatcaccccagaacgttcccttcataaacaatcctaagctcaactaccaaagagtagttcattgtaagataaaggaccctttattccagactttctcattcatcactctggatatgtaggggtttccagtcctttcctgacttactctaatcttcctagtattggacttgtgaggatgtgagagcatgcagtgtggtgtgattgtactgctccttacctgtccaaaatttgctttgagaatgtaatggcagcatagacttcccctgtaccgtgaaatcttttggctcacattcatcttgcttgtgactcatcctcgctatcttaatgactgtttgggatagacgcatttacgcagatgtccatggtcaggaaaccaggcactcgaatcagagctgttaccatagctatccagcaaataataaaaataaataacaagacacaaacccaagccgtctttgctgttcaaaaggaaatttcagtatccatggcacatgacctgtgattaatactactatgacccttggtaactcacctttcatttttatcagcccagcctattccaaatcattatagtaatggacataactgaatgggcttgcaattttacaccttctcttatgacaaccagcgggattttcaatgacacatgctttgatctgtctgcttttatttttttatttttttttctgtttttttcttctttttttattttttttctgtctttttttttctgtttttttttctgtttttttttctgttttttttctgttttttttttctgttttttttttctgttttttttttctgttttttttctgtctgcttttaaatctcttaagctacaaagctctagacagcttcctcccagaagattttacagtcctaatcgacctcatcatgagttctatatttatgcctgtttagacacatcaaagtcaggctttataacaagggccacctgaaaagtcaaggtcaccagcttcttgtcacagcatttgtggtattgtcctactgggcaataatgaagtatgacctttcaaagtgatcaaaacttgaaggcgacattataggattgctattaaatggtccatggttgcattttacctgtagtaatttgtccatagttcaaaaactatggtgacttgttgggcactaatgccactgggagggtagaggcatgcaggtggatctctgagtctacagagtgatctccaggacttctaaggctacatagagaaacactgtctcaacaaaacaaaacaaaacaagacaagacaagacaaaatgaaactctggtcctaacaaactgaagtggttccgtaagtgcaagcatctggttgtagtcacctctctgtctgttgagtcctgtgtgcagggtgcaggagccatgatgctctaagcaaagacaatggtattcaataaaaaaaagaacgaagttggctcttggagcttgctcaacagttctgcagctcttctaatggctctgctcccaagaggcccaccctatgccctggagatgctaatttctgagtgtacagattttagtgccagcttctgatctttgaaatttctctaagctactgccaactttcaaggcctggagggggagggggaatcacttgccagctctgacagggaaacactcttctccgccactaggccataagcgcttttcgatagaagccctgtcatcccacagtgtacatttcgggccattaatcacaataaaatgaggaaaaggtgagttcttctcttgatggaagtttactggtatggccatgtctaggaaagcattccctgaagtgcctagcctttagcccaggatatccttggcttggatccatttttctgatgacatgatacctttaggggcttggtaagctgtactataaagtgtgtctagttcttagaagcaatgtttggagtttatgaaactctcttgctctgatttcttattccttctcagatccagtagtatagaagacactctgaaatattacagcccctcaagcttaggaagttccatcttttagaaagctttgcatttggtaggtgttgtgaaaaacaggaaaggcatcaggaccagattacacaaatctgaagtttttagtttgaggggcatgggaatacttcatataaccacattaatggttggtgtgtgtgtgtgtgtgtgtgtgtgtgtgtgtgtgtgtatgagtgtaagacaatataacagtatggatgtataggcatttgaaactttcatttttttagagcctagtcttgtagagagaaagccatatatattcttcatgataatgccatagcagataacatcaaacttggtaacttaaagcaggagagatttgcctgtcacagttctggagctaggggtcatggtgcacccagggttgcacttggcccaggggccatgagagaatctgttcaatgcttatctagcttctggtagacatcagcttcctaacctctggtcacatcacttcggcctctgcctccatctgcgagagtgttctctgtcttctactcttctattataccctttgtcatgggcttcaagttacaccagataatccaagatgatctcttcatccatcttagcttcccagagcaatctccccaaacctctttttcatacaaagctatatacacagtttccaaggagaagggtattggggggtgggggtggggtatattgcttagcccactgtggtatctgaaggtgagcaagtggaagtcttgagaaagccaaccactgaacacacacacgtgaacaatgatttctgggaactcccaccattctttggattccagcttggaataaaaagagtgggtttcactgggcagtggtggcacacaccattaatcccagcacttgggaggcagaggcaggtggatttctgagttcaaggccagcctggtctacagagtgagtgccagaacagccagggctactcagagaaaccctgtctcaaacaaacaaacaaacaaaaaaatgagtgggtttctagaagtaaaacaaacaaacaaacaaacaaaaaacccagcagtctctcttcaagtggcacctgcccagtctgtgccttctcctccaaggctctgcaaagggaaccatggctctcttgcaccgtatgcatagactgctcttgagaaaaggaggaaacactgaagttgtaatggatttgaagggtgggtgctcctgattcttagtgtgagtctcagtaactaatgttagcttattaaaaccatccaccttaagttcctaactttagagaggccgaatcaggagaatcctgagttcctgagtatcttgatcctgcaggaggaccctgccccaaacacaaagaaacaacaaaacctagaggaaacacaggatatatgtttgtggtccaaagagtgcttagacataatcaagggtaaatcttctacaattcacagagagagactttggaatactcagccctaagagggctgtctttatcaaaggcttgcctcctgagactcagggacccatacagaacagaagcagaaaacattttaagagccagggtgagtgaatgactctaaagaagcagtatcttccagagatgctatgtctgatacacatgtgaactcacagagactggggtggcatccatgagacctgcacaggttcatatcacacaaaatccccgcacagaaaagaggacatgcatacaaactcccacccttagccaagaaggtatcttcaatcaatactggctgggaaagaggaattccgttttctccaaggcaggatcaatggatgcattaatcgcatcctagggcaagccccatactcagtatgcggccaaccaaaaatggaccccacagttttgttttggttttgtggggggttttgttgcttgaacactttttcccatcgttctgtgttttgtttattctgtgttttgtttgtccttttatggtttggggttttgttttgtctttagagaggggaggtagaaggagaaactgagaccatgaagtcagatgagtaggggagaattagggtagggaaataagacaaatatattgtatgaaaaaaattataaatttaaaaaaaaaagtaattcgtctaaataccttactgtctccctcgactttgaatttgttctcaccaaaacaactctgcttcacattgtctgctgtggttttccaaaaatatttgtatgaatatttaattaaatataagaacattgttccactgagcatgaggtgtgttgaggacaatcctagaaacttccagctaaggtttcctttaatcctgaccacagacatagtcatctctgcaaaacacgtttcaattgctttgcaattgaaaccattgcttcaaagttttattcattttcaaaaccaaaaggcatcagagaaataggcctttacagttgcctcaacacttttcacacccatgaatagtgttcctaaacacctgtcttcttgtacccacctttaccatcgctggctctgatagaattctgttcgcctccctatgagaaggaaatgataatatatgaatttgtattttacattttattagtgactttagaaatttatcattgattctcatcctttgcctactgcctagtcacatgttttccatatttaaaaattgggattataaccatatgggatatatttgaaataatcgtacccttaggaattgtctctgtcataaacatttatagctatctttctgcttttccttttattttgtttatatttttagacttgtgtttggtgtgtgtgtatgtgtgtgtgtgtgtgtgtgtgtgtgtaagtggtgcccaaggaggcaagaagaaaacatcagatcccatggagctaaagttaaaagcagtcctgagactaccaacctgggttctgggaactgaacttgggtccatctggaggagtgttgtgttctgttaattaactagctctctccagcatcttctttacagtcatatgtctatgtcactttaaaaaaaaccatatcacagaggggactataaatttaactcttaattgtttagttcagtagtgctaagcatcttctcattgctttgtgatcaaccaaaaactttctctgggtaaaactgaaactttgggtccattatgtatacctactccccgctctcttttatctgccactagcaaccatctatcattgtactccctaacattgtaaacttaagtattctaaggacttcacatagtaggtcttgattttgggtcactgaccttggtgctatggttaacacctactgaagcatggaactggattttctgcttaaagctgtactccttggtgtctgccccacactttgcatggccaccttgctttcaggaaagggggcattgcttctccctcctggctgtggtgagcagcagtaaggtggaaaacaatgtacaaacatctttctctctctttggggatgggggttgggtttcgagacagggttttaccctgtagcctggctgtcctggaacttgctctgtagaccaggctggccttgaactcagagatgtacttgctgggattaaaagtatgtgccatcacccccttagccatatatctctttgaggccttgcttttaactgttttggagatgtgtctccaagtagtatttctgcatgacatgatagcattgttaagtttgatgaaactctataaagtgagtctcactattttgcaattcccccaagagtgcagagatttttgatttttccatgtcctcactaatactctttttcttctttcctttttctcctcctccctccctccctccctctctataccttctgtctctctcctatagtaattaccttaatggaggtatgaaataatgtctcatggcagtttctgtttatatttctttgattagtgatattgaacatgttttatttctttcaaaaatgtttatttttttaaaggtttttttttgtttttttttgttttttttttttttggtacaagtgcacttaattcattgagtccactcctcctcagcctgctgctgctcccttttcctctcctcttccatccatcctgcttgtccacttaggtcattagagctctattgtcatgattctctatgtctgtataaagtcaaagacccatcaatgagagaaaagagggtttgtcttttaagactggcttggttcccatactgtggttatctccaggagcatctcttccctttgaccagtttgccacttgtatgttggctataagaaaatttatgcaaatattttcttatttttacttatctgcattctaagatattctgaatattttaggcttttgcaacattttctccagtagtatctgaatgaaaaagtcttgtacaaatttagaaccttggatagtcttattcccagcacagtgagctaaagcttttatccccttatctagtgatacagatagaatgatggtaattccagaaatatcattgagggttggataacaatgcttttgaatattgtttccttcacaaattaatggacataaactaccataaaatttggaaagtttttcttagcgaaaatatttgatcattcttaggagatacactgtattatatttgagagtgtactgtatcgtgtgctgaaatatggtggcttcattttcaataacagccagacaagatgacaagaatattagtaatactgagaagttcatatgcactaaggtgtatatactagtggtgagtgtagattctgattgaactaagcacatgatttctgtttattcctgagatagttggggcagtttcccagtccttatgctttaaaaaagaaacaagaatcactaaggttttgaattatgattaagcattcaaatcaaatggctactagaataaactattgtgtttagatagcacactgctacacacgatttccctagcctgccttttcttccctgctctcttacttatttcatgaactatggaacaattagttttgaacaatgtagttttaggctgctgatgtggaaagaaactggaaatgtagagatgggtctttggagactagttagcaagcttcatgttactgtgttactaattgaaagtttttactctctgagagcttaaaggggggaaatcatcaagttctcttaaagaagacacatgaaattgacaatcaatacccaacggagatttcttttctgtggatacattttaacaaaacacccatcttcgcatgcagttacagcccttacaagagtgcttgctcttaggcgcatccattgaatgtagttctgcttttaggtagcagttgctgaaatctctttaacgtgagtgcaatgccttgtcaaacagctaaccgtagaataggaagggaaagggctgaagaagagaatgagaaagaaggggaaaccatgtcagcctcttattgacatagagacaagggtgtttgggaagatcaacctgagcttgattagatgacagggttgaggtctgcgttagtcatttgggcaaagttggatctaaacagggttatctagtgcaggccagaggtcctttcagtatgatccaaaagtctgaggataaactagaaggagactggggaaactttgttttccattcaatacctccactcggaacacactttttccttcttgtttggagttcagatttggaatacttagaaaccattctacgggggtgggtgggtaagggggacttttggtatagcattggaaatgtaaatgagctaaatacctaataaaaaaaaatgaaaaaaaaaaaaaaaaaaaagaaaccattctacgttccgtagtattccacgcagccagtttggatggtgcgtaccaggatcccaacatacaagaaggagttatacaggaatggactgctacagatttagagttttgtcagtgttccttctctgtcactagctagctgagctacctcaggaagatcatctggatccttaagagttcaacttccttaatcctgaagtagtctgtggatttctgaaggcctttccagtacaagatgctgtgttcctacaacctggatgcccatgggaggattctacgcagcactgcccacgtttgttagtggggtgcacatctcctttaaactggaaagcaatagacatctcatgtaatccccagtactgttgctatgttcatctggtgaactgtctcaccaattgcacagtctcatatggcacacattcaatgtattgaggcatgggcaaatgtgggggaaactggtaatatctacatctcataattaggccaccgtgtcaagagacagaggggttgaaatgtaaaagtttgtaagaatatccttactgttggaaaaacaaatgcagtgaaaataatgttcgtaaagcaatctgtcttctttcccttaacattttctattttagagtaaaatatcagttggaagaagttgatggctgttctggtaaacacacaaaaaatggactattttatcattattgaaaataaagaatgggccttataaaacaaagagtgagtgttaggagcctgtgcatttggaaagcccacagagctaataacttgctatacttagcacagaagtgcaggccagccgatattgaggcactaaatcatttatggttgagttcgtgacgcagttccagaacaacaacagtgacttagcattttcccctctttataaattactcatgcaaactcttccctaatggtcctctaactcttgttcaagtgagtatttagagaagacatcacgcgatggagtgtccaaatagttaggactcaaatctcccacttctagtaaagcattttagcgtgattaaattaatagtttaaaacagtaacgtgagaatcatacttcctttgtttcagcctacactatgtacattgctccatagactcctgtaatatagttcaacacctgcccctttactcaagcatgctccttcatagtggatgcttggcttgcgttcttttgtgatcccagaataagcatccttgaagctcagctctaccctgttgcttccggacagattcttagaaatatgaatcagagttaaagaacattgtaagagacattgtgctctgttccttggaagctgttgacagtggagctgtggtatggtatactgacacagccccagtctgacaagtattatggtttcaatagttaacaaaagttttccagattaatttattggataataaggtttcttcccgttgattaacactgaggtcacactgccctccccccacctttgcataggagttttctacttcttcttctgtgacttgtatattattattctacattcctatgaggacaatagcctttccttcctcttatttttggcaaaagtagttttcctagttccgtatatgtcatttaatatttgacatgggtttttttgacgtaaactagattaaaaatacctccacttgtcaattcatctgaaagcttctcagcttaacctttatttggttttagtttttataatgtatttattatttttatttgatatgcattggtgttttgcctgcatgtatgttcgtgtgagggtgacagattttggagtttcaggaagctaccacttgagtgctgggaattgaaccctggtcctctgaaggcgcagccagtgttcttaactgtggagctgtctctctctctctccacttgttttagcttttggtaaaattttcattttagtcactgaaaatctggaaatatgtcaatgctatgcttgttttagaattcacttaatttttatgacatttatttgtgtcagtatacttgtgcacatgtgcgtgtgcatgctatgacatggatgtggtggtcagatggcagttgtcaaggaacggttggttcttttcttctatcatgtatgtcctgaggctcaaactcggatcattcatcagctggcaggcgtcctcacctatgagccatctttccggtctagaatttatttaaggttgtatactattgtatatatagggactgtggagtgggcaaccagaagaggggggaaacaatgggggtgtaaagtgagttaaaaagtctgaaagagttagcatggagtttgagataaacataaatgataaaattctattttaatattatagaatatttgacagaggtgttaaaatagtcatgcacaaagcatggtcttatgctttaaaacttggttgtgtcagatatatgagacatagatgataatataatattgagctcaggctcaaattaatattaatgctgaaaatagaatcaatagtgtttttctctataatcctttctatgtgtttgcctgtatgcagatgtacatgtaagagtgtgtgtgtgtgtgtgtnnnnnnnnnnnnnnnnnnnnacacaatgcatgaagagaccaggggccaacttcaggggtcatttctgaagagctgaataacttgtttttgagacaggacttaccctgggacatggggctcactgataaactaagccagctaagcgtcccctggattttcccctccctgcttcctagtgctggggttacaagtgtggaccattgccccatgctttttgacacgggtgctagggtatgaactcagatccttatccttctaccacaagcattgtatcaactgagcctcaggaccattcgccccaattttgataccttctcttgttgcccaaagggagccactacgtaggaacttccttcctatttgtttctttccagttaagaagctaataacagctgttgccttgattgtcctgaattcaatttactgctatctttaattataatgaacaaatgctcgcatgtttttctcctctattcatggaagatgaaaatcttcttcaagcccaaatttgtctttcttgtattttatttccctgtacaaaaaaaaaaaatacagtatatgacaaatgctttgcgtataaagtgccagcatatgtcccacatatagcttaggatgcctgcataactttgagatatttagttatcatccctacaatagatgcatacagcgagcgagcaagtgagagagagagagagagagagagagagagagagagagagatttgaaacaaaacattacataaaaatagtatctcttgtggactggatcttaaagtactcaactgtagtagcaaagcataatgagtcttccatttataacatgagctgcagaagtgtaagacatgatatagagatagatagatagatagatagatagatagatagatagatagatagatagaaggcctgtagagtgggggaaccaaaatatatatctttaattctgctgttgggaaagtgagggagcaggagacaaagaaaattgattctagataatacatgttttttagcttgctagccatacagaaatccatatatgcatatgtggtattgtatttccatttctactccatgagttaagcactaactcaatagcaaggcagtagaaaagatttttggttatttacatatttgaatatatattgtgtaaaaatcattttagtcataatctagtaacagagatttggaatttatagctaggactagcaatgtgcttagagagtctgagaatttttaaaaaaataatagctgtattactgaattcttgcatctaaagttatttttcacacaaatgtggcctgcttgagtgcctgagaattttgcttgttagcggtgttgttctctagatggtgacagtgcagaggcattagggagctttcttagtcatgatgggttttgttttgttttgttttgttttgttgtttggttttgttttgttgtttcgtttggtttggtttggttttataattcagagctgattctaggctagtatttcaggtattttgtcttagtgtgcatttatcatctttctgggaaaatgaaggacttcaatgcaggctaaagaattttcacaaaagagcatttaagattttttaaaagcagactctcccagatgccctgacctcccaggttttttgaaagcctgagccttacggtttgttgttaaagtcaccagactgcatcaacaaacagagttgcaacgaacagctgctactgcacacccccagctcatccgtcacagagacatcaaagtatgtaacaagtgttctctagtgattttgaattgtggaaaacccccacaggctaatacatccgtatcaacattatcttatgcattcatttcattaaaaattgtggatgtttctgatggccaaaataatactcctacattaaatgtttgaagactgctaaaaccacacaaaagagacatgttttatccaaatatcagatatgtgagtttttttcacattgtaaaatattttatatttattctttactaattttaatctctttcacctctttatctcctcctatcccctcccacaagcttcttttcccaagaagcccccatcctacacacacacacacacacacacacacacatataaacacttcaatatatttaacatatatatgctcaaatgtaaggatatgtgatatacattgtatataatgtataatgtttagtgaatatataatatgtgatatatgatatgctttgtgatgatgcatgatatataatatatacttatatttgaacagcaagcatgttaccaatggaactatcttctcaacctcaaggcttgcttttaatatttagaaaaactaaaagacaatctaaaccgtttaatttttaagtagaataagcagcaataaatctaatgtcaaaactgttcagcctattgttctttcttagaacaaatctatccctgtcaggatttagaggcatcgaaactcattatactaagtgttgccaatgtgtcctcactctagagtgtcttctctaaagcagccagtccagatactggtcctgtcctctctctcaggacttgccctttccttttgtgtatattttagctcagtgagaggactgtccccagctaccattgccctttgggttccccatgacacctagtaacacccatataccaggctcaacacatttgtacctgcagctcaagttgctaactgtgtaataggggaaggtgacatcagttacaaaatgattcttttcttccaaggaaactgagcatgcgagcaacttgaaaacaggaccgtgacccatccattttgaaatctccgttgtgaaatatctagttaacactctcacagagaactttcctcatcacacagagaggccacataaatgattaaatgaataccaaccctgggtccatggagtgagctcccttaactcaaatccatacaaaaggcacttaataaatattaaatgctgtctattctcaattattcatgggcatattattcacttatagctgcaaatatgagttaaaaggtcatatttacataatgaatgattctacttggttagttaaatgggctccatgttttacatctatctaaaatggattagaaacttaaaccaatcttattaattaattcccaccaactcttgctccaaaggcaaggttttacttcttgatactttgcctcaatctgccagctgatagtaaacattgccatcatttaatgggaggtcgagaagtagtggagaagctaagctgggaactagactccaaaaggtcagaatttttccatgcctctttcaattgagtctttatggtgaggttttgccgatttgtgaattaagtttttcaatgagtccaaaaaagcctaccaatgaaaacaaaacccttttgataggaaggaaattctctctctctctctgtatgtgtgtcctttgacttttaaaaatcacaatgcagttcagtaaggtaaacctataaaagatatcttttgctaaaaatattaacatagatgagggcacaagttcccaaggctgggctagtcatagagcttattttcatccttgtaggaagaggtaaaaaaaaaaaacaaaaaaaacaaacaaacaaacaaaaaaaaacccaacaaataataataaaatgaaatagaaaataaaaaaaattaaaaagtgagttttttgaaactcccattgtacagtgagttaccagagaatgatagagcatgatacagctaaatgacacagagcaattgttacttgaaaactaaggagacagcttgcccagcagcccctgcagggatgtttgcacagctgccatctatctggacaggttttgggaactatcagcaagtttactgagtgtgagcatttgctgtggtaaagactgggatttgttcaatgcatccatgctggacaaaaccctttgtgcacactggcacatcaaccagtgtggaaaaagtacaagatcagcattcaatcctgtcccattttatgccaaatgaattagtagcttagaaaaggaacgcaaacattaaattaggtgcataaatatttttttctttttttcccccccacttctaaggaaggtcatttgtatatgtttctcttaaaatggtttctaaggaaagaagtgactggaggaaacattagttctaataaatgttagatgaatgcatctccatcttccatgtagggagagaggcttgttgtgagttcttggggcctcctttaggatgctcctgtgtaaagagtacagcaggtgtgctaggaagtcttccctgtgacaacattgaaaggtcattcttatcagagagcagcaaattaagctgtgagaatcgtatccatcttgtgcagaaaggtctttggagacagcgactcagtcttccctggttgtcaccctcagcacatggcctttgtccctcacctcagtcatgggtgctgggactactcctttcctcctttgcctcatttgaagctgggagggatgataacctataaaagtaggcaagaagggctatttgcaatcaaaatcaagaaattaagaatttcctatgataccactgattatatccttttatgacataattacccttagcttcataagaggctggggaacttgagtttataactggacacagtgaaacttaatgacgttcaaacgcaattagttaaggaataatgaatatcaatataatagggttttcattaaataaggtattacctataaacaatggaataataaattaagattagtaaattggccatcttctgtgatatcaatacttctttacatttctaatattcctgcatttttcacagtctacaaggctcacgactgaaatacctgaagtgcaccctctgcttttcaatttatcagaatctcactttatcatgcagtctatgaattaaactctgaaagccgcagaaaacatccagtggccagatttgaaagttatttatagctaggtcaaaactgaaaatggaaaatgaggggactctctggtggatggcagccaccaccttccttttggtcttcaataacttgttaaatgaatcttgaagtggggcgtaggttaaaggataaaggccttacattattccctgagtacacggcttgagatgaaagtttataatggaagtaattgtgttttaagcttaacaatcaatgtgtcactctcgactaataactgatattacgaaagcacattattcagattggagaagttcacttggcttgaggcagaaacagattttaattacgtgcctggctttttttcttttttcttttttttttaaagttcattgtctatcagccattgtttcatatctgcttggtccttgcctctgcctcctcagtggggcagaacttggctcctcctgtctgtcctctgacttcctcacttcagacattttctggctgagcatagattgtgttgagaatggattctattgctaggtttgctctatagttctggttagcaaacatcactctggacaaggcttactctcatgttgtccgtctcaaaggctgtctgttctgcagcctgctgagtgtctcttgcctgtcacggttgtcctgtgtaccaaggctgctgagatggattcctggtgctttgtaggggctccctattaaaatttgagaggtagctttggttagaattatacgcaaaaaatatatatattagggatttgtgttcttctaacctttgagttaaataataagttgatctgatgatgaagaccacatatccatttatggatggcagaaagcttaatgttttctatattatatctgaagagggaaatgtcattaacttcacttctgttttgtgtaaaaggagacttgagttttctctggcaagaatcaggctgccctattctaccataaatgaaaagggtgcagagatacaagcccctacctcagacactttgctttcagataagcaggtaatgtctgggagtctagaaaaatcctgcaaagcacatactactcccccaggtgtcctttcactccatacggtgtcccttgccttattatctagtcctaccttactttcaaccctgtccatcttatgaatagaatactctagagtgctgtctcttttctatcatggctagtttacactataaaaatagcaccttgcttttgctaaatgctctcctctctagaagagtgttatacagggaagtccaaaatagacagagccctgctctactgaacacagagaattgacaattatttttttgcaacccccgaatgttaccactatatgtgatttacaataagctaatgtttgcaacaaaaatatttaatggtgcaaacacaagaccttatctacttagttttccgggattctgggtagtggaagacttgacaccttgcacttgaacatgtatctacttgagataagtgaattagagagtgtttctaggagacagaataccaatcatgtggccatgtctaacttcaaaggagtctggaaagtgcaatctaactatgcgcctaagaagaaagggattttctaagcaatcacaaatgtaattactttcatagtgaccaggaagctcaacatgagatcagatcatctgacaactccatgtttcttcaaatatctagatggctcgagaattacatgaaacctccctgaactgtaaaccgtcaccaaaatgacaggggacataaaacgtgtaagttaaagtcttagttcaaagtcaaatcaaacagaatgataccgactgctctagtgtgacatcagatttctacaaatcaacatcagtgagagcctttgtcctgatatttcagataatagtgcccactttcagagatttgacaggtgagttgttttcggggacagcactttataaattctaagataggctcgaaatctcattccaatcttatcttcattattaaaaatttgtagcagccttttaagctttagaaaacaagttcctgcagcgttagcaagagaggctgctgggtatctgcctctggcagcacatttatttatattagggattccttcttctttgttattctgaattgtaaaagaacccatgcaggaagctttacacactaacacatacaattccccatggtaaccccatccaaggacaggaagaaacatcaagagctcctttatccacccaatacccccactttttctctcccagatacttctcctcctaccaagggttaccaagatcttcactcatttctgtgccaggagagcttggcctcccacgatgcagtgcacagtgtgtgtgtgtgtgtgtgtatgtgtgtgtgtgtgtgtgtgtgtgtgtgtgtgtgtgtgtgtgtgtgtgtgtaaaaccctgtgatgttactttgttaggagtgatttcctccttttgttcagggttgacttgtgccatcattcatagcctattgtgagactagactgaagtttatttattcattctattgtggagacccatcggaacagtttataggtttgtaggtattacaaagaatcctctatgctagcatgccttttgatttgaaagatatacacatttcccttgagtatgcacctaagagaagaatgtggtttgtgccatttgagtaaatttagcactatcagaaatgcaggtttttttccaaaggggttaaaccaatataccagggcaataaagagggaaaaaagaggggggaggacagaaagataaaattttgcataaaaataaaactcaattagctcttctggttttcagactctaacctcttttgcaggaaaataatcacccaaaggcattgggaacttggtggaaaaaaacgttaattgacgttccttgcttgctttctggcccctaagtacttcatggtatacaaaggtttaaaataaagatggtagtttgttgtctgtgagcttttataaactgcaccacaaaagcctcccaaacactttgactgggctgttcctcttttccttctcttctgtcggctttatgataaagatctaggagtgtattaattaaaataattttctccttcctgacctttcattacatttttctgctttacacacatttctctctcatcccacccccatggcctttgcgagatgctaaattattaattaaatggtgaatcttttatcttgaaaaaagtcttttttgtccttttcccgattttaaataaaattgtaactatgaaatgtgttgcacatacaaataattaaatatccaaatgcttcttattttactttgattatgtagttaaaattcagtctagaggaaattatacggaaataaagagacacatgcgtgtatctagttatctaaacaaatgtgagattaatgttggtggcgtaatactgagcctctggattcatctgtttgagctgtttgtgtgtctttgcagtacccagaaataggccataagagggtacaagacctccttaaactggagttacaggtggttgttagccagcgtgtgaggacagggaactgaacccagttctctagaagagcagacagtgttcttacccgctgagctatctctccagcccctttagattcatcgtggtgtcagatctgagtgtgagggtgtattttatgtcactgtgttagagattccattaaggaaagtatttggtatggggaccacatacatttttgggttctgctctttaaaggatcgatttaaaaaaaataaaggttccgtacttttagcatgtcaagtgaaatcattttcaaagaaatactgctgtcttgttttatgaaatcatgggttaaacatttctaaagcagtaagtgtcacaaaatagaggtcattaaatcaagtcaatgggaactgaaagaatgctacatgaaaccttcccctttccatttggactgctgaagcctttgtcaaggagaagcaatggtgttgtaggtttgatatgtggaaggttgggtgcagtcaacagtgaagagaatggaccagaaaaccccactggtaaaatccacacagtctaggcaagcctgtgtatcaggcaaggctgactcccggattaatgctaccctatgctctctgcctcttcccctgtctctgtctctccctgcctctatctctctcttcctctctttatctgtttaacatcaaatttataaaaatgaaactgctaccagcatcttaggttcatgcaccttataagcattagatatggagatctcatttagaaatctgaagtatttaatcattttacccttctaatagtaaaattgaggtatgtacttaacatatctatgattccacaatgtaatactgatagcaactacagccgttcattttaaattttgcatcgctaaagtaagttcctgggaacaaagtaaatgccaatccttagtcacatggacagaggacgcacagaggataagggttcaaatacaactttctgtggtacactacggtgtactagctagccacagtgtgtatctctataaatagcaacttacaaccgtaagtaattgtttatgtaagacatgtatggccaaaccatcaggatgagcccctgagtgagacagagcaagcatggaatcgacctataccacacagacagagagcgtacagttacgcccctgccattcagtggaaaacttccaatgatcatgcatttgaattctggggaaggagagaaagggaaggaagttggggatccacctcagcaggctttgcttgcggttgtttggcctgcctagaagcacaggacaggcacatacgacttctgcttttttgtgtcgtgtccttttatgttctatttgtgttcatgtgagcctcagagtaagaatagagccatgctttggttctaattccctcacttccaagctgtgtgactcagttgacagatgaggacattgaggtatagacttactaaatgccttatcctaagaaaaacgacttgattgaactggaagaagtgagaacaagaaaacccaaacacacagctctaacatccaaggccaacacacagctctaacatccaaggccaacaaacacacacctctaacatccaaggcaaacacactcctctaatattcaagatttgcaggtgccagtatagttgcccatgggtgtagatagaatgagaggagaatgcacagtctacttccacgaaaccagcggtgctcccgagaactgctggctcttcatcatgcccttccattaattattatccttattctcccttcccgaatactgagtgcctaccccgagttacatgtatagaatgcagtacacctggaactgcacaagcacaagtctgaacaaggctcatttgctcaaacgcagcggctgcggaatctcaggctccaaggaaacaggacttgacatcacttagcttgagggcatcagagcccagacttcaaccaacatgagaactccataccccagcacctgcctgccccgataaagtcgggctacttggaatcttattcttgcttctctccgtttttattgttatggttaaaataaatgtttgtttatgttctaactactaatttaaatcaggtcctcaagccagggatatttactcccagggaggggaaaaagtaattgtgatttccttattacaagcctgcttgtcctcacttcaggagtataatcaaacatcagctggaaacttccttttaatatagtgaatcagcccgcccacacattttattttccctcaggcatattgctgggaaagtctatttccgaattttacaaaatcaacatatgttgaaccaactggctgttttcatttaaattgacagcaactgaaacttgaaaattatgttttctttttttcttttttacccttaaagttcttggtgtatttgattttgaagtagaaaacaatgttctactttaaaaaaaaattgtttggtgtatatgtgtgtgtgttatctgtgtgcatatgtatgtatctttgtgcgcatgtgtgtttgtacatgttagtgcacgtgttttcctgggtgcacatgtacacagaggctgcaggtcaatgacagttgtcttcttcaatcttttctccacattagattgtaacaggagctttgtgtttgtttgtgtgtttgtttttgagacaagatctcactatgtagccatagctggcgtggaacttactatgtaaaccaggctggccctgaacttacagatcagaatgaaggtctagatagtttaatggaaggacaattgtaaagtataaagagagatgtaatggtgttagttataatcttaagcaattatgacctttcttactttttttcatgtttttctttattttccgttgggttgtgggatggataaaaataagaacacactgtgttaatctttgcatgctgctcagcacacagtaggcattcaccctagcagattaaattgatgtatgataatataaccaatgtaatgaatgaagcatgttttctttatatgtacacatagtatttgcatgttttgaagtaggaaccctgcaatactacaccgtttcagttgtgcactccttctcgttactcattactcttaagtcagttggcacagacattggacttttagcttaaatgacattatatggacagtacgttcagtcagctcagctgcactcctaccagctcaaagctgggcagtacccagcagtaatgtgtttttctacagtctggaggctacaagtctggcctcagggtgctaacatgatcaacatagagagaggactctgatgactgacagatactaagccttcccgaatctcctcttctggaagtcccatcccatctctgagccccaccctcaccatctcatcaaaacataattatctcccgatggccttcacctccaaatactcttacgccacaataaggagcatcttgtatgcttataacagtatagctcaaagctgttattcacataaaaattgggtaaagtgctttgcatcattaatgtttcagtgagcaaattcctgaagctcctgtttaaaaaaatcatgctgttggaaagatgttactttccaaagacgcgtttaacatttggtagcacttaatagacataatatttacaacaaggaaagacactcaccagagagaacgcatgtattgaggggccggtgcatgtggaaagagctcacagcatggctccgatccaagccaagtactgcttgctctgccaccccctttcccatcacatcctcactgtggtctttggggtgaccttaccagtcatttcacagggtgattcagagtcaggaaaatatagctacttttccagagtcgcataccagaccgaagacttattcaaatgacggtcttctttatcccaaataaaataatgcataggaacctggactaaaccttatgttaaaaaaaaaaagtcaactaccttcatgtttatcagaactatgggttttaatgaagcttcaggattcaacattgtttcttaagtccccgagattccaataaaaagcatccatgtaatccctcagttatttgaaataaacattgatcagattaagatttgtgctttaggttagacttctgttaatatttacagagacccaaggatgtacataaattttacatgcagtgcattctcctgaccaagacaatcacacttgtagactgactagatcttgcttccctcctttccagtgacagagctccatttttggatagtgaatgaattcctccagaaaatcctgttactgttttgttgatttttttggggcttaatatctgagttaaaagcatacacagtatggacctggtcctccctgctcaacagtaaaaactaaagaccacaagtggttctagcccagtggtagaatacaaggacaaaggactattagaaatctggcatgagcacataggaacaggccaagtggctcacaccaccccagctcacactattgccccaggcaggcaggaagaaccaaggaacaatgcatgtaatggaaaagaggaggaggattggcagttgaggagtgatgggaacatctcaagatgccacttaaacctcctacaacagtgacaattatccccattcttatagatgaggaaatgagatttgaagacattacaccagtttgcacagtgtgaccagactgataaaaaaaatcagaactagagtcagacagaaatatgtgttgagttctacttcacaagaggtcttttaccattgtgtagttacacaccgtttacttgtaatgaacttcagcagaaaaagaagcagaacctctccatataaatccatagaatgggtccattttacacagttatttccaacaacattcaaacttctctccaatctgataggagttccatgcctgacatattgtaccacccagagctggtccacttaccagaagaagggagaaaagaaaacatctgtgggcatctgagaaaaacacactaaatatcatgacttcctaattcaaaattttaaagttatatatatttaaacataacaacctttcctttctaatcagtacctcttccatttctggtcttgtttaaatcactttttgacatcataagaataaatcttgatacagtgttttggagtttcacattttttttagggttttgatggtcagctcttttataggagccacaggtgtttccatcatcctggacctagagccttcattgtcagggtgttagataacgccatctgctccctctaacttcatgttggctactgcatataaaccttggagaagtcttcagatgggtctgggggctcaggcaaagtcagccactgaggttttctgtgatccccatgaatggcagaggtcaaaaataaaaggagtttgaaaaacatagtcaagttagctcgtattttaagttgacggttttctgctgaaggagggatggaaaaacaaaaacaaaaacaaactcaaacaggatgctgcatgacctagatagtagatttcactcccttttctagaaaagattatttaatgtaacccatttcaaggagaacagttcatctgcattctgcctttgctaaaagcacctttgcaaacacagctgtcatgtcaaattcacgtaacatgattttgagcagctactcaagtatctctcgatgcattcataaatgaggtgttcagtgtgctccaccgtgaactcccacatatcctgggttcaggaccttaccagtgaatcagatagaaagctcactgtgctaataggttgaggtcttgtcttccaggagcagtgcatacatacccattgacttgtaaggtcatttataggtaaatgatcctacagatcacaacttccatttgcttctttatgggattcccctctgtcaaaagtagtaggattagatacttagagctgacgacagtttgcctccgccatctgtgtatgaaatgatttgtatgtgatattccattgagccttcctggaattctgtaagaattattctcctcttacatgcacaataaaacacatttagctttttaaaataataagctatattcacaccctggcaaagaaaaaccctgagtctttgagagaagtgtagctagcattattatttcccagcttaaaatctgtcatccatctgcccggggagtctccccaggcaatacctctgttcctgagggccttggaagctgcacgcggctcctcctcccttctgctttttgtcgactagatgttgatcttggtacaaaaggtggctttggctgtggcatcacctcggtgccttctgcatttgacaaattgctgggtaacaacccgatcctctctgcaatctattgtaaagatcgtccattttcgaaagaatctgaagcatgactgtataaaaatgaagcagcaatcgtgaagatagaaaagaactcacatgcaatccttgagtttccatgaacataaacaataagaatgggttagcacatgcagactactcatgtgtactgttctcctacaatgagtttttgtaagtcatagttctgaatatggaagagtgttatgaattaagtcagattgaagtcagatgggtagcaatgccttggccagtaaggatcttacacgttctgtatgtaaaaattatctctcaataaggatctctcttgttgagcctttgaatctggttggtaacttaagagttaatcaccctcaataaggtccatttcagacagtgatctgagacaggttattcagttctctgacttctgaaaggtaatgactagtgctgcaaaccaatctttacaacagcaggcaatgtagtataaataaaatgatcgtgggaacatgttggaagaagagttagaaaaaatactagggaaaaaaaggggggggcatctgtaaaaaatgaatattttaaatgccctggaatattttaaattcagttcagaaatattagatttttagttgcattgtgctttgactttttcaaccagattattctcttaaatgccaattattcatcttcaagaatgcatgtaattcaactaaatcttgtattagagatttgtgcacttttcactcgttgatatgataaaaaagcatcttattcatgtcagaagaagaaacattgaggccattctggtgctgtcctagagtcatgtgatcttgcctccttaacatttcagaccaagcaatagcttgagtagttttatgactgattgaaggtatgaagattaattataagctacaggaccattggaactgattttattttcatgaatagtatcctctactgtcttattatccaaatgagaatgaggtcttgggaagcaaagatggtgacacatttggtaatagtcaagatgcacacccctcctctaggttcccaaaggatttgggcttgtcatagccatggtatgtgtccttcccacggctgcgtgtacaccttttgtgctacgtgattcccaatgggaatgcaaagtcccagagggtgatttaatccagagccaaggcagaaagtcagcagggcatagcagacagatgctcagcacagcctgggactgcttggaataatcagattgctttagagttgattagacttgtatggaagagtctagcctattttaaaaattaatgctatggaaccacatctccttattcccttttcaaatatagttgttgtttaaataacagttttagttgagtagagtagggagagcaaatgtggcttggtaccaaaatgggatctgtagcccgtctagcttggaaaatcaataagcctccgttgatatatcttttatagaatagagatgataacagtatttgtatcacgtggttgttaagtgcattgaatgagttatacatgtaaagtagttctaagagtggctgccacatcatgagtaatcattatttattagctttcagtgtgcttctgatgaacattcctggagtaggtccacagaagacagagggatgatgtttgctgtctagcatgtgtgatatctgtgttgagcactgggaagaatatagacagatgagccttctcagtttctaggagttggcaatagaattaaaagaatcatccaaaagaaacaaccccatgacctcagaaacaaagagaccagtgtgtgcactgaaaccatcagagaagatgcaaggagtgttaaacttgaaccaagcttaggaaaagagatgtgatttgaaaaatatcacttaacgactcaaacctgaaagtgtcatatgccatgcaaacctttcctgtgtgcctgttcttaaaggaatgtttaaaacaatgcttctgttgtctgtatgtctttctacccttatgaagtcggagtatctaaaataagatgagaatactcaggaatctgcattcgcaactaggtcaagtgggtttctaatcaatcaggtaatgggatttgtatctcggagtcccaaattggtttaggctttgtgcagttcattgcagcccctcttagccatgaactctaagaaacagaaacacttttgttcagtgcctagcttagcgcttctcttgtttctttgaagaggcaggcctccaatcattagttggtgtctatctttctgttgttctctccttgactctggccctgaatacagtgatgctgtaacattcaatgcactgggttacaactgttcagcattatacccactacaccagctttcactttgtcttgatttatttcagactaaactgaggtttagttactggttagtaaatcagttcaccttgaaaatttaaaggctttctagtcatcttcatttaaaaagcagacttcttggacagacagggtcttttagtttgtattgcagcacctaccctctagaggctaagaagaaaaggtacttcaaggccaaagtcacctgggtaacactgcaggattctgtttcaaaaacaaataaacaatagtagcaaatgggatatgggtaacctggtgtggtggtacaaggctctaattctaactcctgggaaatggagggaagagggtcaggaattggggaccagactgggctgaatggcctcagcattccattccccccaaaaccaaagaagtggatttctagattccattgctcaggcactctggatttagacttaaattggccatctgtaatagtagcatttaagtgtttccctacttttctaagttgtaaaaatgaaaattaacaaatgtgtcacataattagacaaatagattcagaaaaagagagggtaacatgtatagaaaatactgagatcacttctcagtctttttggctaagatcaagtgtagaaaatagtgagatggctactgattttctattctggacactgtctggagaagctataaaaattaaaaccacataagatctggcagaaaggaattaggaagccttttgaggtatagtcagaggactgagttaaatgttattctgtgtgcagagttgttatgtgacagatttttcttagggaaccataaacaaaagtctactcaccccaggtaggcaactgaggacagactaaagtaaagacatcaccaaagtccaatttgttgaagtaatgagttttaatggtttacttatagaagcagacatgactccaaagaccactgcatcactaatagtcaccataacacaaatgatagattaacaaaactgacgacctgaacagcacactgcactgtctacctgcaggcagctcgccaggttggagtgtgtccttttcaggtagctcagctgctcagaacctcttccaggaagcttcgctcggctttgtttctggtatggagttgactggtctccttccatgtagctggccttgtctgagaagcttccttgcagcttggcttgtctaagaacgactctcttcaatattaagaggaggagtggcctggtgagtctggttagtttcagggacttcctgaatctcttttgagttgtttactgattgtcttcatggacttgtctgaagggtggaaacctcagaggaaattgcgacacaacaaagatgcaaattttggacatttgaaagaggagaacaaataacaatgtggcctccaataggattcatgggaaacagggggaggtggattagatggtttctaaaacctgctgtagagctgatatgataccgtgctattattctaaaggtatatagaccatggtttgtaccaattaaatcttattgtcttcatacattaactttctgcttaaattatattgtaaattcatccataaattagtttgcataatgtgtaggaggctacataaatgtgattgtagctgtagctaggaagcagtgaaagcctgttgtttacctaccctgggatttgaaacatgttggtaggtaacagtcaccattaaatatataaacatacgattggataacttggtgaaagctgagctaaccaatattcaatttccataccttactatcttttatggtctttgctcttgaggttacttagctcattgtatatgtaatcttgtgactatcatttggtccctgtctcccatctctttccaaggatatatttaattcatcactttagtagcttgaaattagactgagtagtagtcaatgtaccatagaagccagtgagaaactgaaaaccaggactcttttcttctctggaaagccaagtgttaaacctaagctttggaccatcaaattaggtcaaatatataggaagatctcactgttatgaggcgttacaagctgaatcaaaagttcctatccctgttgagcatcaagcaccttccatgtcttctcctgtgaaaccagctacaaaaggttgtgaagtttcacaagtgcaggttgtgagagtggaaagcagctggctgctgtattccactcaatttaaacctatctttcaacattcccaagagatatcttcttgttgatccccaggagagtcaccttttctttgaattataggcacacattatttattatatcaatataaaatcttgtatccacaaatgagagaaaaacaagtgatatttgtctttcttgggtctgctttctttttacttagtttattgctctccatttttatctatcctcctgaaagcaatataatctccttccttatgactgaataaaactctattgtacatgtatttttatcaatttttctatggatagacatatataggctgattctataacttattgtgaatagtgttaaccataaacattcttatgtgtctgtgttatatgtggacttgaagtcttttagacctctgtgtccaagagtagtatagtatcatatggtcttctacttcggttttattttattctcaagggtttctttgtatttttattttatatgcatgagtatttccctggtatatgtatattatgtacattcttggtacccatggaagccagaagcaggtgtcagatcccctgaaactaggatttcatatagttgtgagctgctatgtgggtgctgggagctgaaccctgaccttctgagagatcaatgactgctgttacctactgtgtgagccatcactctagcccttatttttagttgtattgagaatttcctgaaccaatcactatagtggctagaaatctatatatccatcctaatgtatgttggcatctacagctctaactcttacatactcacaagcatttttgtctgtctgtctgtttaatgatagcaattctaactgggttgggctggagtctgactggagttttcatttcatttccttgatggctaaggatattgaacatgtttttcacatgtttggtgtccatttgtattttatcttataggaactatgtgttcagttcatttgtttatttattgattagattgagttcttggtatttaacttttaagctctttatgtatcctaggcaggagttgcctgatgtactcctgttctacagtgaatgagcagtctcctttgctgtgcagaactatttttattctttttcactttaattgaactaattgtcaatatcttgggttcattttctcatctatcagagctctttgctgaacatctctggctgtatgtaggtcttgaagcatttcccattttctgctaacaatttcagatatgggtgaatatgttcaatgtccttgtatacttctatgaaaatgcatttgtgaaacttgttactatggcaagccaatataatctaattaaaaatttttccccaacaaagcatgatgagcatgcctctttaatcatcttatatggctctttgtatttctagaattagaaatgtattctaaaatttcctggaaagccatgggcaaacaaagtttttttttttttcaaataaactcgttcttcatcacagtggatataaaatgaaatgttgagccaaatacaatctcaagatcttcctttcaatgagccttccaatgaagaacaccccagtttaattcttcaagaaaagcctaagaacctgctttgtgagtacggctgaaaaacaaaatcatgatcacgttacattttgttcttgtaattcttcttcaggaatttcacaacttttcaattataccacagagagttataagctctattcaagcacttgcttatgtaacaaaggatcttgtgagcttctttttctgtgtctgaaaacataagaaagatgttctccagcctgggatagggtctcaaaaatggtgcaatgtctttggttcaaatggacataattaaagtataacatattaatagggtttatttccatcgaactttaactggtatagagtagaggatcaaatactttgagatcaacataaaaattcttactcagaaatgaaaggacatggaatgtcagaagcttgaaaatgatcctaatgccagcaacagaggtgttgacaagttatgagaaaattaaaagtttgaactccatggtccagttttccaagttgaaacttgagaacagagattgtagcggcagattggtaactgccaacctcaaactgattgtgttgaaatagagtatggtgtagaagtggccccaggccttggtttgcttctctagttttgatgcactaagggtcagacctattgacttagaaacagtcattaagaattacatctattttgttgaatggaaaccgtgaaagtagcactgtgggaggactggatgagtccgtgcatgggaagtgtttggtacaaatgcctaagtgccacaggcttagcacaccaccctttgttgcatttcttaagtgattatgtgcactatctggaatggacataaagtaaaacatctctggtcactgcagctactaaatgccttcagcatcatcttgatgccaagacatatttgaagtgttgttttcaatttaatataaccttgaatgtttgatgcccatcctaatactttttagagcttcttagcacacatataaatattttattaagatattttatcttttccaaagagttgcacttaattttaccacatcagaagtactgagtgctgttctagaattatgtttctcttttttacctagcacatggatgccaattcttactttctttacaaacacacagtatggataagaatttgtaacagagggcagtgagtcaagatgctaattccgatgggttctctagcagctcagctcttctcgggtatggcaggttcttggagcaggaggaattctctcatctctgagagtacaaataaatgtgtgtcatctactgggaacgtaaggcaattcttccaggccatgctaactgaaatgtgcggctggtcttgaattaggtgcaagcttgaatgcaagaagccagcaaaataagaaaatctactcggattgattaatttgcccacactgacagagaaaagttgcaagaatgcattttcttctggtgcccaagcagtgacacatcatttatgtttggcaccaagcttaatgagaacagagatgaaaggttttgcttctgagagcgaagagttctgctcacactcttcttcctatgtgaagccttatcacagtggttaggcgagtaagcttgcatctatgacagtctttcataaaccctgtgtgtaaattagtgtgtcaaacagtcaccatatcacatactttctagtgtgtgtttagtgggccatagttttgagtccctttgtgttagaatgtgtaacttgaaagaaaagtaacaaagtaaagttgattctaaaagaaagaattacatgattatttccattataaaattattagttatgaaaaacatattatataaaatccagttatttttacttttttctaaatatctaagtaactttttactatgagttttgaattttgcatggggcacaatgtgttgaaaaggcaaaaccaaatattttcctacattttcatggtgccatgaggatgacacagtatttatatttggaagtgatcaaataagtgatcccttactggatccattctaagaatatataaagaaacttggatataaacttggataagcaacacagaatgttatttgatagtgttcaaacaacacattaaaaactaaaactaagaatgaaaaattaaaacacatcagattgatcgtattaacagaggtataatagcaagcagtacattgcccaatctaaataaattggcagttattcttagatcaatttactgatgtaaaatggatgcgcaaatggtactgattttgtcttaatctgttgtacagagtacacactgagtgctttatgtagcaaacaaaacaagacattttaggtcgctactactattaatatttacaaattgcatatgaagggtgaaggcacagaaaggttaaactttttcccccaagagcatgtgatatagtagataccatatatataggttttcaatgggagttgatgaaagcatgaattaagccatggtgaatgaatctagtcgtggtacactaggttaattcagtaattacaggcagagccaaagccagagcttacggtatccttccatttaatggacattgaatgctgaggcaagctagaacgcctgccaaatgcctaataaatctttttgtctgtgtacttttcagcagctcatctgtctcctatgtagcctctttcaaacgagctgtattaattaaaaaagaagcaatgaaaacacggctcgatattcgtgactccattaagctgatgtgattttaataactgcttaggtgctgttgacagatctctgactgatcggagctcacttctctgtgcgcttcttattctgaggaccctcggtcaccttctaataaagtagctaggttatgggactggtaaaaccaatgtttatcaggtatttttgaagacacagttaaaatatcaacaagaaaagtattttaggtcataatagatttaaaaaaaataggtgtaatataaaaatcaaagtttagccacacacacatactattagaattaaaatgttatcacatacctatgaccattttaccatccttatcctacattgctagccatgtctcaaatacagtgatctacactcatgcaagcaagacacatactctatgattatgctgtatttattttataagcccactttacgtaattcacaaatcaagcgtgttttatttggagcaggcattttgtttctttatttaatagttttcatttccctcaattataggactagatgctaccttgtttttttcttgtgattaataattttgatgtttttaaactttttgccatcacaaatcacatctagaatgccaacaaaggcaggacaatttctatttgactatcagcgatatcctaagcaaacagacttgtgcactcaatgaatatttgtgaaatcaacaaatacattcactactgccacagctgaccttgccatgtctactcatgcatatttggagaggtacatggctagatgcagaaatcttaagcattgatgcaaatagaattatcagttttcttaatagctagtcttcaactctccacactggctattacagctgattctctaacagtgcacaagaattgcctgctcgttatggatctgcaacacttgggcttattaggtttaatattttgcctctgtgtttgatgagatgtttacctcacctctaaatatcgtctgcttagtcactgatctatcttccctaatcatttagcaatgttgcctgtctcctcaacactctcttttctcctctttactgctctgactgcttgcatccagttccaacagtgccaattcacttcatcttaagtctattaaaatgctacagtagaagcttatgctacagaaatgctcatcacagcaccccaacatccaacatgataggtgacattagccattgaatgtcccagtgttagggtaaaatattaatacagaactattcactcaagagctcttagaatttttcatacttgacactttctctgcagtaattataattaaatagagattatgagtgccgtgtctctgaaaattggtcatcttgttcatttgtcacatctaggcacacatcataagactcttacgcaggaactccatcttctagttttggtaattgtgaagccagtcttatatgcctcactgctagagttcaagttgacgatatatcacagtgctgttatgtgttttaaaacagcacttaattcattatgggttttgtggaaaatgaatttagcataatgatagccgcatgataaatctctggcaatagaacggagaacttcaaatttccataacaactttacccaaaaattacaagttaattatttctgtctttgtattaatttattatatagtatgcctaaagagctagtgacagacagtaggcagagacatttaggagaataaagatagagatatattctaggattagaaatgaagtggatatggtaggaagagatgtatccagtcaaataaatggatttttccttatgtatgggtggcattcaaatgatctagctcggtgttatttgaaccacctgacaccatcttatacttctactagttacttctcttgttgccaaggtaaaatacatgaaagaggcaactaaaggagacagagtttatcttggctcccagttttgagggtccagtccaccacagaagtcatagcaacaagcctgagacagttggtcactgtgtcttctggtgagaagcagagagcgatgaatcctggtgctccactttccttcttccttttttggtactggacactagcctctgagatgccactgctacactgatagtgggccttcctgccttaattaaacccatctgaaaaatcccctatgtgcacaccagggttgtggttgttttgaatccagtgaagttgacagtgaagatagcaatctcagtactgtaaaagaattagaaaacgttatgctttttaacggactgaattctgtcaaaatatggccaagaaccagcagccaaatttgcagtcactggggaaaatggcctgaaggaaacacacttggttttgagaatgtaattgccaaaagaaatttcattcaaatatgagttaatgaaacagtgtatggttaagtaaaacccaacaataatcatgagtgtattttgagtgtttgctttcccataccaaagagaattttgtaagaattgctaatagataaaatgtgaatattatgtaagctttatcagtgtttttctcaactgtttttagtggttgagctatcaatgtacccccgacacatcaaagaggagagattacagtttattgataatatgttcccagttagccttcctgggatagtacaatcctgacagtggtgggggcttaagaaacttacagacagaagctagagagctctggctagaccttaggagacgactatggctgtgtctgtgtgtgattcccaaccagcgtttaaagccacaacctctgccactgcagttcaacaggatgggggaaagcaaacaattcaaaaaggagtggagagaaccgaagaacgaatggtgaaagaccaaacaggttacacaacaggaacgtgttattgacagcctggctaaatacatgaatggacctcttagcagccttgtgttctgaaggaggccaaatgcctcagggtgaagagattaaagcgctgatactgagggcaattatatgaattcttgagacacgattgagatttcttatcaacagaaatttccgggaaggatgacgtgtcagaatgtggaaactttccaatgtgcttgtaagagttccctaaagagaggactatgcagagactgccccacccggggatccatcccataaacaaccaccaaacccagacactattgcatatgccaacaagattttgctgaccggaccctgatatagatgtctcctgtgaggttatgccagagcctggcaaatacagaaatggattctcacagttccatctactggatggaacacagggtccccaatgaaggagctagagaaagtacccacattgctgaaggggtctgtagtcccctaggaggagcaacatatgaactaaccagtacccacagagctcctgtctctaactgcataagtagcagaggatggcctagtctgccatcaatgtgaggagaggcccctggtcttgtgaagattctatgccccagtatagggggatgtcagggccaggaattgggagtgggtgggttggggagcagcggaaggggagggcataggggatttttggagagtaaactaggaaaggggataacatttgaaatgtaaatgaataaaatatctaataaaaaaaagaatttcctaaagacgtgcaaaaatgctaagacattaacagaaagtataagaaagtgtaagaagttctaacactccataaacatgggcaggcacgcttatgtctttcgatctgcagatctgcagctccaagtcaacaagacattgggggctcttcgatatgtgtggaattagttcatatgttctagtttggaatatttctgtatctttttttttcttgattcccattaaatatgtatgcaattgtgacacattactagtcagttgtgacctgcacgtataaacaatatatatcccaaccacattccaggggtccttgttacttgtgacttggagttctattttgtacgttcttgatattattgataaaagaattttttgaaagatgtggacttgggaagtaagctcaaggaccgttttaagagagtttgagagaaagactgcaggataaacaaagtatgaaacccagacaactgcttgggagaaaggagagagaggagaagagtttcggaaagccacaggttttgagctcaggtcagtaatggcagtctctaggccgctgtagaaagagctagttattgtttagaggaaaagcagcgagagagcccagaggaaaagagtccctagagcttgggcctgtattcaaagaagaggtgggcaaggaaaggctccagtctggtgttaagactcaaaaaagcaagtgagctaggtgctacagtagccttgtaaacagccatcccagggagaggatgctgtgagtgtaagtattgattattaggggatagtcggtcctctcagctcctttgcaaacctacaggggaggcagctttcctgaagaatggcctcctggccaggtgactgacaaagcaagtcacaagagacaacagtatgtatgtaaggttctgctcttggggcgtcaacctgaatatcttatttccagccatggtcagaaatagaattcagattccattcttttgactaagaggaaggtacctcaaaaaaagcccccaataagtctactttttcatatacttaaagggagggaggtttccacatggaaagaggatatctgtaatggcccctaagcttgctgatgtctgtctgtctgtctgcctaatgatgtcagtgctttctgtacatggtaggtattggccagcccattgccttataacacattgaaagtgcaatacatggcttttaaatatcaagatagaataaaagtactgacggaagtttatacatgcacttaaaatcatcagtactatatataaatgagaaggtttttgttctcatggttactcagggtacagcactgataggacttagaacaaccattctgatagcagtgaaatatatcatacttggttctgctactccatttatactgttgacattaagttaaatattatcttttggtatttaaattaggcatatattctcccatgataaacacatgagtgtgattaccttataagtgaacttttgaggaatgagggtgcggtagacattctcacatctatcatctacatggctgcatgtgtgctcccagcttattctgaataaaagtggtattctctgcttgtttagtatttgggaacatcgctttgtgcttttttaaaaagattttatttatttattttatgtatatgatgagtgcactgtaactatcttcagacacactggaagagggcatcagatcccattacagatgtttgtgagccaccatgtggctgcttggagttgaactcaggccctttggaagagcagtcagtgctcttaactgctgagccatctcgccagcccaggttggttgcagttttacttagtattattgatactgttattattggttcttatgttgcagctttacatagtattattattactatcattatcactttgtaattcagtgggtcaaatccagggccttgcatatctcaggcaaatactctaaaagctgaacttgagcccctatcatactataaatgaagaatttcttccttgactgcactccattctaagtagggtcccttcttgcacttccacttcccaaagaatcctgggaagaattctccccagttccctgggtcctgggccagcacagctaggctttcattgtataattatttacatagtggagatatattcacacacacacacacacacacacacacacacacacacacacgtcacatctagaaacagaaacgcttaggaaaggcagtctgtcttctttcccttacaatctgaacagttctcaaacaccatgctggagggtgggggcggggggtatgactaaacccactgcagtaatgagcaaccttcttaccttgttatccagtcaccacccaccccaccccaccttccccacccccaccagctccctacaggaaccacttccctttggtagcctccagagagcttgctcaactaaccaaagcttggatttgtgctctccttaggcagtgttatttattcctgggaaggtgagattagggtccattctaaccttctctttcctgtgcatctctagtgcttctcaccgtttgcagctttttttgaggctgctgcttcttctctgtcatgtccttcccccagcagaagatgagaggaaatggtagtgtttacacagagatggaaagcctgtgcacttgagccctgaggctagatctggcctagtgcttcggttcagctgttcccaggtgttttgacacaagcagtcagaaagcaagtgtgtccaaagagcagcttccagggtcctggctgctccctgctgcaccctgctgctccctggcatgtttcttcttctttggaaagttcttacggggctatggtgccaccagcccttccctcaaccaagtattcttccctggaagatcagactgtttacagcaaactttatcttaatataaaagcacccagaaggggtgttaacgaggctttcagtgggaaagccactgtaaagaatgtgtcacaagaagacattctgatgaagtttagttcatggtttttagaatagggggattgttgggatttctatggttagccgaaagtgaaatatctttcttcgtttccttaaacaaatttctcttcttggatctagtagggagcctgaagaggctctgatcctgtccattctctacctgggacattaaaggcaagtgatgcttgcatcttatggaacactacttcacatactaagtgatgtagagagaatggagaggatgttcttgccaaagatgtcagtatcttactgtcaaatctatcgcttgtcatcaccagtcttgctgaaaatatgtttaggagccaggaggaacagccttctcatgtaaaagaaaacacacaagatgaaaaatgaagtcctctaagccaatggtattgactttactgagggtagcttttatgtcctagatagaagtggaacatacatcaattagagcttaggcaatacttatctggtcaagggtagtcgtttgtttttcaattagtcattgttaagtggacacagccaagcagaaccttcatagctctaagattctggctggtgaatatcataagctacacataagcataacaggataatcaacacaattctcttatcctacaagccaggctgtaatatgtcaatgaaagcacattttgaactaaattcgggtaactggaaaactgttgtcatcaagtatccactaactatcatctgcttggttcttacaagtttcatatctgtgaactgtcagtcccctagagagtaccataggggtcttacatggaaatacatgtcatactgctgtggcaacgttcttgagacaaaaatagctacatagtttggtaacatataagattgtattggagcctcaggtttgggacactatttagatttgtgtgctcctgttcgtaggctacaaaggtcttggttttaaattaataaacatttcttgagtacaactcaattcacccatgaaaattatttttaatgatgattatgccaattaacatttaagtagaataaagatagcagtggttagtaccccttgtgtaaatagctgtattaagtccgggctctacattaaggtacgtctcatataataaattactcctaagatggataatgagactcactttctgtcttgtccatgaagtttatgaacacatatatgtgcacacacatggcactgtgtataatgttgtaagttattttcagctgtataacaaagttatagacattttagtagtacaaagaaaaagtcactctagttattgcccttttaggataaagactgtaccaatgtgtatgcaattttccaaagttagccaatgaatataacaacatatgtgctggtaaattttctctatgtaaataagaaagtactctgggtgcttctgttttagaaaaaaatctcttagatatctttgtattgcagcatatgtaaggtggttttgtttttcagtagtattctattttgtacatacatcatgctgtctataacaactcatattgattaaatgtccaatttgttttatgctagatgtgtgtgatcatgtcctaactcttatttttcacacattgcatctaatcaaaactttgatgtgctctcattcatcagactacaaggtctttttgctagtttacagagggtcaaattaacaaatattttaggtctggagttttaaagattctgccctagatattcaagtctaccatcactgtcttaaaaagcagccactaagcaatatatgcattgatgatacaagtttcaatacaatcttcacaaagtagccacaggcttggtagaagggcaagagcttgctatcaggacacctgagaacaatcgtttgttgatgagttgtgtagatatgatgccctatcatggcaatgattgtgtcttctgttctcctctatgtttgtacaaatcgatatatgcctgttgaatcaaggaattaattcacaaagaggtgcaaagtcaagcaattattttaccatttgctatctctaatgagcctggttgttttgtatctgaaaatacttgtatcaacttctggttagtcataccttgttctcatatgcagctaggtgtacagattttatagttacgatgttactattaatatttttttatcaagcgatataagagaaattctgtaacaaaaccaaggttgtgcttgcatttcaaatgttgctgctggtctgctggaaaaatcacagaacgccatgatgatattacaggtttcacatgaagtttctatttataatgtgtccaacttgtcttttgctcacaataaaaatcaagtgaaataacagctaaaattactctcttttagaattggaggatgattttgtatttaaagacattactttataaatacatatttggaggtatgttgtgttaaagaaataaggctaaataaagaagcaataatttctagtgttcagtattttttcttcctacccctcttgcaactatattgaaattatatctataaacatgttatgtccttcaggaaaaaatgatatattgtagacttggtttcttctaacaacataagaaagagtaagccccttaaaacacagtaaatagcaataaaagaaaaacctaggcagggtagatgcttgctctcattcctgatagagggcatttctggttcttatccctaatgccaacatatggtaactttagcgaagcatgccaagcttcagttggctctattgaattctttctgatactcttcattaattttccatattcccaggattgctcaagtattgcaactttggaaacattccaagtatagacctaactgtggctaaagcaatcgagcaccataccggtctctagaatcatattatgattctactgggattagtacattatgttctaacttgcccttcaaccacagccacaagtcaacgtaacagccacagttcaagaacaggttaactccaatcactggacttctattcccaacatctcataaaactgcccaagaaaataagcattatagtgtatggacagttccctccctgtgtaactattatgctagtgactcacccaggcttaaaggcacattataaggaactgtattcttaatttactaagatgctaaaagcatctaatttgagactatgctggggcctagcaaacacagaagtggatgctcacagtcagctaatggatggatcacagggctcccaatggaggagctagagaaagtagccaaggagctaaagggatctgcaaccctataggtggaacaacattatgaactaaccagtaccccggagctcttgactctagctgcatatgtatcaaaagatggcctagtcggccatcactgaaaagagaggcccattggacacgcaaactttatatgccccagtacaggggaacgccagggccaaaaagggggagtgggtgggtaggggagtgggggtaggtgggtatgggggacttttggtatagcattggaaatgtaaatgagctaaatacctaataaaaaatggaaaaaaaagcatctaattttattagcagtgttataagacagaaggcaaactgtgcaaacatatatatagctagcccaggagacaaaatatcttgtgttctctttttagagaactcagttcaggaaaaccaactctcaatggtgagtggaaatcgagaagtgtgggcaatatgtctaatgtttacagctgagacctagctccttactgtcagttttatcttaaaaaatgccttccagatgggtctgtgtctttctcaggctaaagagcagggcaagaaagtcctagaccctttgtatgcaactgatatgatggatgatgggtttttgcaggactccagacagcagttggttattaaggaagggtagggcccgtgggagcaattgtttctggcctcttttcttatcaagcccccaaacaatctttcattgactgtattcatgccacaggagcacagtcaatacaaaatcccaccaagagaaaaatctcatgcagaaacagctgtgctcaaagtgcagccagtttacactggcaagtgggaaaactttcccagctctttatatgttgactctcgatagctgtggtgtgaatgctgccatttgtaaataagggaagcctgggtttaaacagctttcactaatatctataggtaaatgagtgaagtagtcagccctgtggcaccttagaaaactctactaattctcgtcaaaacagacatgcatatgtccaacataatatgttcaagtggccaagtttcattttttcccccacctcccatgaaagttgaggtaggacttttttatgcctatatcatggttgacctgaagtccaggctgcagaggtactgcatgccattcaagaacatacagagttaaatgtactaatatttttatatggtaaagctggggctcggggtagggaatcaggttcttgaaaaacagaaaagtacccaccagttagttttattgaattcaacacttgtgtcacagaaatccattgactaagttaattccctgaaaatggctgcgctctttgctgcttacatccacccataccactgctggagagtgttcagcttattgctcaacgctagtggacttaaacagagcctccaaatttacacggtaaaatcagctacgcgacatggtacagaagcctgtctttggcagaaatttaaaaaaaaaaatcaaggagtagagaaattattacagacaggcactaagaaagattgggattccccaagaatctaaataaatattgagcagaggcgaatcccttggagagacgagagccttctgctttcagcttaatgaagcagggcttcggcgcttcctggtctgctcctgtgtatatgtcctctgcacgatgctgtgtgcctgactaaataaaggtaaaagcccggacctgtgtcttatggtgttggcagtgactgcatattcactctaatggaaactgtaaaatgtgaaggttacctccttcacattccttgaaatatttttccttgttaaagtttctctcagccagaggccatgtattaaatttctattatgtagggcagcctctttttctatttctgtctctttctctccctctctgtctctcctgtctgtcatggtactctgctaatactagatgttcaatggatatttaacacctttctcttgaatgtatgcgtcttgtttgacatcattcttgcacacactgaagaggacagactgagccgggctgaacaccgctggccaatctccctcgtaatctgtactctttggatacagttgttcaaccagttactaatctaactaattgtaacctgttgaacaactgaacccaaagggtgcaaagttggaagcatttcattgagaagtcagctgaggacaaaggaagctccgccaatccccttcagtgcggagaggcgaagactgcttctcaaacacaagccgtgccacgtgatccctccgaacgcccgtccggtggtgatgctgcgtaagtctgcatgtatcatctgttctcctgctaaggattatacatagtgcaagccccagagacagtgctactagccatgtgtttttttttttttttaaaaaaaaaaagctatctgaaaatcagcaaagttatgagactaaagggttcggaaagatgagacatattcctttgattggtgctcatgtctcaaggctgatatgggcaattccagaagcttccagaaatgagatgtgaagtggtccttggtagttttaggaggtaatgtaaccaagtttattcatggcaatgggcagtagactgactttttttctgcttctttttaaccgaaatatattttttcaagatgtggctcaattagcagaatgccttcccagcatccccacagccctgagcttaatcccgtgtaccagattaactaggcatagggacacatgcctgaaattctagaacccaagaggtagaagcaggaggggcagaggtttaaggctcagcctcagctacagagtttgaagtcagtttgggatgcccaagaaccctatcaagaaaacagaacaaaacacccaaacgccaaacctttcttggtcttaggatcgcatactattagtaaaactttatgctaaaaggagtgtgtgttgtttcagtgttttccaaggaagttcccaggggacatgtctacacagtagcatctagtgaaaagggtagatttgagttctgaatgattctaaatgtcatacaagatggtgtccccttttcttattggccgctaagaagcccacttttcacatgggtgcctgtataagacattttgagtgaaaatggttttcattttcctcagcactaccaccctcctacagggattatatagtttatatagatgaagttgctgtggttatatgaatgatctatcctttaccttcccacaacctccactgtatcagcagaagtagcagaactgaggcaaggaacatcctaagacaaatgatgatgtatgatcgcagagaaaacacaaaaggaaagacttggttgggtgccatgctaaggatttgaggtttgtcatgaacccaggaagaattcccagcagttatgtgacaaatttgggtgctagataccaaacggataataaacacacaagaggcaagaggaattcctttagctgaaaatacaaactgggttagggagaggtctactcgtgtggttcttgcagaacgtgtggcttgaactctaggctctggtgtttcaactaaggcaaggatgctgtttaggccaaataggagtgtcctcagagtatgtctgggggaagtgggcaggccactgaacgagaagtcactggtaattgctaagtttggaggttggtgttgtgggttttgaaggtaggaaggaaaggccacttctacagaacttgctggtaggaaagtctaggggccaagtgagtaaaacaaatgtaagactgcaataaccctactatgtatctgtaagcatgttctcctcgttataaatggtgtattttaaatatcagcctgcctatgacatctgcgtgtgtttttctttccttggtcattttgatatataataaatataaatagtgaagatatgaccatttctatgtaattccttcaaagtggcagtcttatctaattttgaattgagactacaactatgactagacacttctcattaaactttgttggcatgatttataaagagaaataggaaaacttgaaattgtgtgaaggtccaaatttgtaatgttggtaaaatgatttattgtcacaaaatgttcttagtttgccaagtgctgtagacttgcattaatttacatttactttttgcaattaattcatttcactttcaccagaaacgatgcgattattcactctgtctggctcctgcatgctatgtttttcctcctatagctttctagatatttccagtgtggccacgaaatagaatttattgatgcttatgtaatgtcgttgtgtgtggcaaggccatttgtcaccagggactctggcagagcatctattggaaattcagtccactattaagaattggcatgaccacacatgctgaaggcatctgcaggaggctatcagattaatactctatagtgtctgtgtagaggcacatactaaaattctcttaggagtcagactgactaaattggatacaactagtagatggtaattgaaatgagacagcccctgaatcttaattggcatcaatttagacttggaacaattttgtgtaacagtgcattgggatcatgtttggaagacatagatatgtatgttttcccctgttctatgagaaacattgcaaaatccaggctatagaccgggttccactgactcatctgctaattcatccctctcatcttcgtctttgtgttgaactcagtgtagacaccactgacagcaaaattaccacaactgggaaagagctaccaccttgagcacaaaactcacctgtgatttgaagcagatgtctggttctatgccctgcacttcaagtttcagctcaggctaccttttcttattttttttttattgtcctttaatttccctttttgctgctgctgctgctgttgctcctcctcctcctcttcttccttctcttcttccttatcttcctcctcctcctccccttcctcctcctcctcctcctccttgtctcttctctttcttcctactctttcttctcctcctttctcttccagacaaagtcttgctatatagcccaaactggacatataagctcaaccccaccccccagctcagttcatgagtactggagtcacaggcaaacgccaccatgcctgacttccacagcatctttctaatccctgcagataagaaaatgcacgtgcttttaagaaggacctggggtccagtaaattctgtttcttttggtgcttccctacataatactgaaaggtaatgcttggagagttactctttttcattttagttttacatatttgatcgattagctataacttccagctacaaagccagagtttactgttacattggatgtgtgaagtcattgattaacatacacttctggatcgtattcctcccttatctcctcattatgtgttccaagtactttattgttgttctcagcctatgagagacgtatattctccaggctacagactagctgggaaatggcagaaatgaatgtgttaagaaattcacaaactcaaacagtcaaaacccttgacatcacaagcttttctgtccttctgaagctgagggacagagtgttaatgaagaagtcccaagttcaccatgtatccagcaagctaattgagcacttgaagagctgttagacccaagtgccaagcaaaaccactactctcagagaagttaggaagctgccaacttggttccacagtttccagaactaaagaagccagactccatggccttatgtctgtgctcagcaagtggtcatctgtgataatgaaggggcttcttggagacaaaggcttgatgagagtgacactggccttcagaatcaggatggcacaatgctgtcatcatggttctgcgagcaccagtgtttgttgtgatggaaggacattgtctttgagactctaaagaaaatttcatttgtttatgatgtgttaacataaataaatacttttaaacacatatttgatttatgtgttaacatctctagctaccatatgtggagtgacactcatcgtacatacatttggtgttttcaggcaaatcagttcgtgggtgaagtgtgtcaggatttgagagtgagcactcatgatgtgttctttctctttcttgtttgattcttcttatttgtagtacacttaagaggatccatgtcatagagtattccacaacacagaaaaactttcatgtctgcctagtataagatccagggactcatataatcactggtcactgggtggcctgcttaaacatagctaagggcatttcccttctgtccagaccatactcagataagcctacccaatcagccattaattcaatattggtaaaacctggcagacattttctgttctccttcccacgttagcctcagacctagctgatctaatacagtctcctaagcagagagcaatcactctaagaagtctgtaggagccatgcccactgggataataaaatgctcatattctctctctctctctcctctctctctctttttctttttttttttttgatgctttcaatatctgattccatttttttttaaatttaagaggatctaccttctcattagactaaggctcatgcagagaagggcaactgtaattaatttttttgctcgcagttctaaacctgataccttcattttcaaagtttgttgtttcgtagaatccataagcacaggtaagaacgtttgtcgtaccttgatgaacctatggcttgttcctctgcacagttcacctcttttgtttgtttgtttttgctttgttttgtttagtttaattcttacttctgccccagaccaggcaactctgcctcagctctgtctctctctatatttttatttcccctcaagtatatgatcccaactcatcagaatagtaacaagtccttaagatcaggagagacactcatgataaccttactttcatgttcaagtgagtaactgtattaatcatatagcgagtacaagatcattgcttgttttctgattttaaaatgtgaagttttcatgtgttcacctctttcggttggatacacatcccatcaatagagattcaaggaaggttggggaaagccagtgttctgagcatggtggaagaatttaaagatgcatggagtacaactattgtagttgaataataataaataataataaagaaatcagacatgttcaaggttagtgaaagcaagtgattaagggatggggatctttaaacagcttcagtactaagggcttcagtacttatccctatcgtatcgtcaaacttatggtggtttctcattaaacatatgtgccatgtgtaacatgctactatgattggtaagatgtacatttttaatgaggcctatcatgggtactatttaccagtgcattgtgttgctgctcttcatcaccaccagttccttctgggtttcccctcctctcactccattcactccactgaatatatatatatatgtgtgtgtgtgtatataatatatatgtatatgtgtattatatatatacacatatattcatggatatgagctgacctttggattttggaggaaatgatgatccaggaggaagtttgattttgataccgtgagtatttccagataggtggtatagaattaagaattaagtataaatcagtattactcggtggtcataactaagaagattgactttaagttgaaagtaatgtgaataaagagatggttcagggtgtaacatgaacgtggtgcaagcctgagaaccagagcccagatcctccacacccatatgaaagacaatttgtctctaagtccagtgctggcgaatggaagggcagagacaggcagatcctggagagtcgtggaagccaactaactggactggcaaaaatgctgagcttcacattcagagtgagagcttgtctccaaatttaaactggagaaacaatagtggatggcatcccagtgttagcctctggcgcccttgcttgcctgcatgggcgaatgtaccagcacacgtgtgcatgcgtgaacacacgtgcacacacatgtgcatgcgtgcatatgccacacgctcacacaggaggaaggagtgtggctgtgagcatcacaactgcctccaagatacagagctggtcccctctcagaagttatggactagatagctgaacacactggaacaattcatttacatggcttagggataaagcacttgcctaacaacccaagtatgggtctggtaagaaacagttgtacaagtatctgtaatcctagacctcctactgggagttggagtgggtggagacagacaaatcaaaaattgccttacaataatggggcatgcacagcagtaaacaggagagactctgtggagtacctttcagcattttgctgagacaccatgatcaaagtagttgacagaagaaagggttagtaaggggattcgagtctgtcatagtagaggcaccaggcaacagtcaccgctgctggggcagaagctggggtcttagatcttgaatagcaagcccaaagcacagaaaggagagagggagagggagagaggggggagggggaggtataggagttgtgttacagatgtatcacttagggctggaaagctttccatacctagcactagagattttgtaagatggcctatgactcttcggggagtgttatcactccaagttacatgactgaggttaagttgtttatacatgtatacacagacatttattatatgtgtgttttaagtaaacataatataatgtttcccccatggctttttcagtcattcatggtgtgttttatttcccctccctcctctttccacttaggttgcccctcccctcagtttttaactggttaatatttaatgttttaaaccattgagcccagttacctgtctcaaatgttattttatttttttaattatgcatataagtgggtgtccacgtgtacatatggatacctatgagcacaaatgcccactgtagagaacagaaaaggacactagctaccatggagctggagttccaggtggctatgagctaccagatgcaggtgctggcagcagaactcttgtgccttctgcaaaagaagtgtacacttatgaccagtgagtaggctctccatcctgagtcaacagtaaatccctaagagagttcttcatctgtttcattagacttggaaaaaacaactcacaatttccacttcagataggttcagtttgatctagaagcaaagaaatggtttaatatctatcttatctgccctcattttttctgttggtttatgttttataatcaaattcaatatgtaacctaattatataaatggcatgaaagaaattgcagctctaaggagttttcatataaaatgtatgaaaattagagttgttttgggaaaagctgggcactggagtggtaacaccctacaccggggctcattttactggggtcagtcacatggcacagagactccatgggcagcactttattcttgactttttcttttttaagattaagtgcatagatgtatatgtacttatgaatagtaaaatgagagctaattatgtgacctgaggcccattaattcacttgtcctgcagtttatagtatttcttgaaataccctgtctcctcagccaccgttttcttgtaagaatatcgatagcagactcccaaaactcctaagatactgagatgggtcagcaagaaaacgaacacacacacatgcacacaagcatctatgcatgcatgcatgcacatggcacacatgcatgcactcgcacacatgatgtaaatataaatgaacatttgaaacttttaaattaaaacacacacacacacacacacacacacacaaaaccagacctactctatggtgcttttaaaattgctgttgaactattgtaagattttcacttcatcaacacagggtttgagggtttagcaaatccattctttatcgcaacctggtcatttgttcaagacccagattttacccttctccctccagaaccttctgttctcacctctgggtaaacaggatgataaagagatgtcacctggccacttgcaaggcatatgaaatgcccctgtgttattgtgatttgccgtgcctgtaatgcccagttagagcataccagtgaatgattactcattatcttatcaactattactttatttattcaacagatattattgagtagctgctctgtccaggcattgtttatttacctcggttctaatattgtgatcgcttcttttctatatataattttttatttaatagaatgcttctgttacattgtctttcattccctttgggttttggcagactgacatgaagattgtgagattatactgcagaatcagaaggctcgtggagaacaaccctggctctggtcttatgcaagcggatgcatgtcattgtgtcatgcttcattgttcaatggggatagtaacgctatctcactttctgcagagaaatgggataatacacaaatagtgtgtcgctgggcttgacaggcaggaaaacatgaaatggatgttacttgctattgttactaagctccagcgctagtgaagttgagttttagtaatctttttaaaaaatgtcttacattgcaaatacctattaaatgcactcagagtaaactgggagaaggagagattccactatctggcctatatgtcagaaacaagagccctgagattgggtctggcaatggtgagtggaccatatgctcagaataccttctagaatgtttgtcactctgcctgaactgggaaaggtgtcactaacctcatctctctttctcttttaggtaagtacatcctcattgttgaagggctttgctgatgggtaagtcttgtggctgcagctttccttgttgattgacatgcctggagaattggagcggaggttggacttgcacccagagaagacagccttacatagattgtcagcactctcatatgctttccagctctgtctcaaacagtatgggggaaaaacacacccactgtttaaaagttggataaaatgtggtatctaagtaattgaagactgggttttgggttttttttgttttgtttttgggtttttttgtttgtttgtttgtttgtttttttgttttttcatgctgccagctgaagtcagagcacgtttgcaaagcagttttctctttgtggctttaaatcataaaactatatctcaattaaccaccatatttttggttttaccgcttacacatagggaatatttttctgtgtttaaaaaacagatattctacaattgtattattttaatgaatcataattttgtaacaaatagaaaaagtggcggataaccctttaagactccttgtgtaagatattgtggaggaaattcctgttataagtggatgttgtcatagttagtaggtctgtaggtggctgacctacaccctagaagactaaacaagaagaaatgaccttaaatcacaagagatttagtgtagatatgtcagactcatgagatgattaagctatgaaacaattagcaaaaggaagttatgaaatctctgtcactggtgaactttaaaactatacatgctgttaagaaattaagatttattctgtcttcaggaaaagtattgaaccagctgtttggcttcaatgatgaagtctcgctttgctttttcagttaaaaatcccatcgattaacttcatacacagtctatactccatgttgtattctgagtcttctaggaataagatgctagaaaggaatttgatatgtaaagatgttagataaatcccttgtaagagaggaaaaaaggagagtgagaagattcaggagccaggaagatgtgagtgaggcgtcactccatgatacaggttggacctaaggggagggcattgaatggaagcatcctaaatcatgttaagaaaacccttgtgaatcctcaagtccaacctggtcaccaatggagttctgtactttccaaaacgtagccaagatcctggctgggctcaggcataagagttgggtagactgtggaggtttagtctaggttgaaacgttgctgtagacttcatagacagcaactgagtgccaagatcaatagtcatctctagatgtggggtctgcaacatgtttgtagagcctcctgtgcaaagatcctatgtctcagctctttctgtgtcttgttctctttcaaagtactctcccatcatcaattttcactcaaattctatttattcttcatgctgagttattatccccttcaagaacttattctgggtaatacagtagctagggttttattctagaattatatatgcatccttgaattttcccatgatatatgttgatgtttgttgttagtcacttgtaaaaataaaaataaaagataagaaggaagcttctgaaaagttgtgctgagagagagagagagagagagagagaaaggaaggaaagaagaaaggaaggaaggaaggaagaaaggaaggaaggaaggaaggaaggaaaaacgattgtattccatttcttggagtagaaatgagtgagtggctgttggatcagacacaagacatgctataaacttacttaactgagaaccagcatgataatatcatatagaagtattgtacagacatggggaggcagaaggaaacatcgttttgtagaaagtgggaggaagactctttgggaagatttgtctctaagcttgtcttgatggctaactacttcagagttgattctctgtggactacctggttaacagaatggcagtacgaaggagtttaggaaaaacacacagatcccacagtctcgtattccataagcatttagggaattgaagtgaaagaggcagcaaatcgttgcaaagccaaatggcttggggtgtcaggtctttgtgagtagtttggactttttgttggagaatttaatcaaattcaacaaaactcaacatcacttggacatggccaaatcacagtaggactgatgtataaaattctcttattctttccaaatggcggtgattttaacaatataaagaaatgatggctggcatttacatgtattgtgtatctacaaactactaatgaaatagaatgaaatcataagctaaaataaaagcattccacaggacgctcaaatgtagtaggcagagcttactgatctgatctcagtgtgaagtttctcacgggtccaagttctggccagcgtatgtttactgcttatactgtggattatgaggacatgtctggaaactctggcttgttcttccctacggcatctatttctgcataggaacataagagaccagggttctagtggggatactttgtaacactgtgaaacccagctgtagaatattatttaagtcagtatgtattttataaaattgtacaacatgtctatagcttctcttgctttatttgcatagcctttccatcattctagaattgaacctgggacccaacacatgctaaacacattcttccactgagctacatccccagacaaatgccatttgtattttcaagaaagcaatatgaagagaaactaattatatctctcctcactaaattatcagtgtaaaatctttatgtaagcagaagttatctgtgatgggaaagcaggtgcaattgagttgagccttttattctgacaaggtcaaaaaaggtaagagttgttcaaaaataagcttactttttgatcgcgtgtgtgcaattagtatatttacacagaagcacatggtcacaaagaaactgccattccttagactatcccgtgtctgtagtccctgtgtgagttcatagctgtttgcttgctgaagatacacattctaagttagttccagtgtcattttgataggccttttcttgactgcttcattagtactcatatttacaatgcttttctttctttctctgcttcagtctttgttaagaacccctggttcctgttgacaatatggtatacggcagtttgaaatgtcagtttatcatcccaactggggggtataggtgtctttaaaactcgagtttctgtctcttagtcctactcttttccctattgagaaattggcttctcatttttgctcagatagcaccaaatttttaatcctgaaatttgagagtaggttcacaatggctacctgatgcctctgtgatggagaggagggagaggaaaaaagaggtattagccctttctgatgattttccatcgctactgtgtcttgtgtgcctgtggctgtcttcaacaagcattcagtctattccccatctccacccctactactccagtgtgattgtgttgctcccttcgatatagctcagcatttgaaaatttaaattaagtcacatctataagtttttttttaaccaagtattgattgaaacaatatggacttggtgatttctgtttctgtacttaaaacacgagttaacagttctgctttcacaatgataagaaaggaattctagcactcgctggaggttttattcttgccttcgtagtatagacaggtgtaaactaactcaaaatatcaacccagttgggtttagacaaagattcaattgttggaaaacaaagaaacgtgaacaagggtgcatcagtatttttaagcaagtgttcacctctgaatatgtttcagacacacgcttaggtctctatcatttgggtgtacagttatttagacttcatttcaagcctaatagtgtggatgaacagatcggcagttaaaataatccttaatcacttattgttctatttatttttgtgatgtttgcttcagaaaagcatataagctatcccaatttgtgggaagtagggaccatgcaaagttcttagaaaacataaatataaatcatgatttgtattttcagataaatttagttctgtctttctttaagtctatagcaaagaaggaaacaataatatttttcatttcaagactactcaaacttgatgctaagactttctattaggctgtctgtgcaaagtaaggcagtcctgggtctaacagtattttctatgagctgctcaagtgcagattagtcatcatggataaatataaatgacactatatttcatatttatacaagtcaatctttgagaccatcactggcataaaaactttgcatggaaatttactctattgatgtctgctgccttgatgatgttgggcaagagtttagtgcacacaggagaatgactttgcagccttgctctgggactgtgtatctctaggacataacatcttgacttattggcaagggcttcactatagaaattaggtagctctcattttgacatttaattccttctgtgaattgtccataagctgatgtttctattagaggactatgtagggggcatttttaggataatattaacaaaatcgctaagatatgagtttggaggcaagatagcaatgcatctggtttggagtacagtctgtttctgctatcatccaaagcagccgaaggaaactaggaaagagttcattttcttttacaatttaaaagcaatgaatatatcaagatagctgactgtatttctgataatccactacagttaaaacagaaaatcatacttcattataggtactggtataatacacataaccatccacgtcaacaaaacatttccaagcttagcaaatttggaactgaagtacagggcccctttttctacagatagtgatggagtcattctaagacaggctgatgctgctcgtgcgatgcatacgacggggtaaaagtaaatagtgagttatattattgctgccttttgccatatcaaggaaaataaatagaaggaatgagcttttgaccaagtcttttatgcaattactttgagatttactgagaacaactggaaatctcataaagttggaaaatattaaataggagaggtgtaaatagcagatgtcaggtgtttaagagttcaactgcagttgatggtcacactccctcagaaatctacttcaggtagaacagctccccttctaggccttcgtcatcagatgatggaaatgaacaaagattgttttgttaagattcttattaatatgttgataaccaacaaatattgagggcagagtgatgtacacactgaacgattatctagagagagcccaattgaactccacacatttctttttttttttgttattcctctctaacattttttttggctttctttttattgggtatttatttcatttacatttccaatgctatcccaaaattccccaacccactcccacttcttggccctggtgttcccctgtactgaggcatataaagtttgcaccaccaatgggcctctctttccactgatggccaactaggctatcttctggttcatattcagctagagacacgagctctgggaggggggggtacgggttagttcatattgttgttccacctataggattgcagatccctttagctccttgggtactttctctagcttctccattgggggaccctgtgatccatccaatagctgactgtgagcatccacttcagaccttcaaagaagatctaatcccagttcttcacaaactattccacaaaatagaaacagaaggtactctacctaactcattctatgaagccacaattactctgatacctaaaccacaaaaagacccaacaaatatagagaacttcagaccaatttcccttataaatatcgatgcaaaaatactcaataaagttctcgctaaccgaatccaagagcacatcaaaacaatcatccatcctgaccaagtaggtttcatcccagggatgcagggatggttcaatatatggaaatccatcaacgtaatccaatatataaacaaactcaaagacaaaaaccacatgatcatcttgttagatgctgagaaagcatttgacaaaatccaacacccattcatgataaaagtcttggaaagatcaggaattcaaggcccatacctaaccatgataaaagcaatctacagcaaaccagtagtcaacatcaaagtaaatggtgagaagctggaagcaatcccactaaaatcagggactagacaaggctgcccactttctccccacctattcaacatagtacttgaagtcctagccagagcaattcgacaacaaaaggagatcaaggggatacaaattggaaaggaagaagtcaaaatatcactttttgcagatgatatgatagtatatataagtgaccctaaaaattccaccaaagaactcctaagcctgataaacagcatcaatgaagtagctggatataaaattaactccacacatttcttaaaggtaagaaatgactgcttttgaggcttttggtatctgcggaatgaattcttggaggactgacttattttagcactgaggtgacttaggtgggcatctgagttttaagtaaccatggcaacatttgcttattgacttagtactgctgatcgatcactctgtgaacactcactggcctgattgagcactcaattactgaatactctcttgttgagcactcactgtctgagtactcacttgctaagtactcactgagtactcattaccaagcccttgcttactgagcacttactaattgagcacttatttaatattaaggactcagaaagatgaaaaaaaggtgtggccaatcattcccaaaacaaaatggaggagatcgctataaaaaatgcacaaataaacactagggtgtgtcagagtgtgagcagtattattggggaacacagaggactttactcattttgaatgacacacctgcatggcgtctcaccgggaaaaggttggattttccttggagagtaattcagacatcccacccatttctaattattgtattaaacacccttgtaaagaagtcagtaagtatgttacctttgcaaaattttgaccaacaagagtcatggtgttattaccactctgggtttcagtgctgcctctagtctatgaaaaagctacttggaggcaggggatatatagacgggcttggtagatggtatgcttagaatgagcagagctctgtcctgatccacagtccttagtaagccaggcaactttataatctgtaattctaggatatctgcatctcctgctagtgtctctaaaagttactctcggtgtgtcttggctgcccgtgcttctcttcgtctttcccagatggttctggttggttactgcctctcttagtgtaagtcaataagatgatcaatataaaacaaacttgaagcttcctcttagaaaggctagataagtgctaggtagtgtattatttaagaggatcaagaaaggagagataactagaatactgatgaggtacaagttaaatcactggcgtgaggctgtaaaataatgaatttgtgtgtgttagtccagcttttgcctcagactgataatgcctatattttaattatagctttttgtaaatacaaatacaaatagctgggatcactggtctagaagtgttcttaatcaactttttttttttaagtccacaggtatttaatttccctttccagctttaaaatcatttacatttctgttcttattacagtctcaataaaatacatgcttcggtgtatatatttaatgtaagattaaattaattcctttaaactaatttctcctataatagagcagtgtgagacttcaattatttttttaaaaaagtcccttagtattatatgaaattacaaaagttgtcagctaacaagctacctgagggttcattagtttatcatagattaatataaccttttatttttatcgatattataaaatgagactagactgtcttcaaacctgtgctagaggaagcctttagtttatgtctgttggccaaatgaaattttaactaaataaatgtttactggcctttgaaatacaggtgaaatatctaatattatatatatacatatatatatataaaacaaagccccgagctaatgctaagtaaggtttatttctaaggaaactcttcatgggcacaggcatattgatttgctatcacaatttgtaactaaagttgttcataactgattctctttgtcttgtttagtaaatgtagtctggtctctccacatgagactcatcttttcttttccacaaactgaaagtcctgctcaatattaaacatataagaccgtcatacccatctgaatgtaaaacgagaggttacagtctgatctcttgaagcaatttgtcacaagaatgttttgcaatagaaatttcaaagtcaccatgcaaagcatcactccctttaagaattaatgtgcatcagagaaaactctcatggcagctgccaatgcttaacgcagaaacccatcactggccaaagaaccaataacaagtgacggtggggttctccttcctaagtgagattgctcttttcactgcctccgaggctcaggagcatcacagagaggcaatcagagtatggagaaatgtgcagtcaaagacatcttctggtcatgacatagcattgcactcaggaactgctatcattgtctgaataagacctgcagaacactggaccccttaacatttcaacatgggtgtgggatggtagggaaatggacatacaagggcctgctctccctgagggactattagcagctaaaggttgttggaggaagggtgttattttattcgggggtgtcactgctagtcatttaccctgcttccagtaaataccccccctcccatgcccaggaaagacattctaaatgcagtagtttgtgtggataattaactctagctattggcttccaaccttagatactcttacctgaggaacaaaggactaaaacaaaagacataaaaaatttgtggctgtgctagatgtgctgctggctttagaactttccctctgtcccaacgtcacagcagtctctgtacttgaagagctgttatcttttgtgacgcttactgcagcgtacacaaatgctttttttttttttgcttgaattaaaattaagcaatactagagaagagttcaagcatgattgagaattgcacaacagttgaagatgttgtctgagctttgcaccccatgcatgtaacccaatgcctacaaaatcagctgctttaaatatgttgcagaaacgtactggaaacatagagtactgacgaaatcctttgaaaataccgagaaacaggaattccccctccctgcccttttagattcaattaaccaaatggtgccttgtaattccagactcctacgggtgggggggggggagctgttgggaagcatcaggatgggggctgcagagaggaccttgaagaaaggatgctctgagttctaaggagttttggaagcagtgatttgaatgccaaacaaagggtcatgcctcttacagagattgcatacaaacagaacctagaaaaccataaagtcgagtgtgttgattctttaggaaggtgcggtgtccttgctatggtaggcgtttctctgctgaagggaaagatgtctgggcagggatatgggggatgaaatgatgcatcagaaataatactggttcttgtagagatttaattctataatcaaaacaacaataaaatcaaatacatttatcctgacagtgagaaacacatttggttctgttttgagaaatattttatttttttaagtgttatgcatttgattcattaaatgattcttctgtatatgttaggtgttcaggaatttaggtgccgttctagcaaggtatggagtcaataaaacaagacatttcaaattaacatgctttacagaacaatgcttggaactgtgtttcaaaagccacattaacgctcaatgaacaaaagaacacagttcattgggattattgtatacgggcatttctttggagactgtatgattaactcagaggtagtttaaagctgagagtcagacggtcatgttcttattataacccatatagtttccttagcagctacacagaatgatttacaaagcaaatggcttgagtagtatttctaactggggaaattgtattgtgtttctctttcaaatctctgtgatccaagttctgggtgtaacccagagcctgactgggggaggggagggatagcccacgtgtgatttactctttggtcactagatggcaccatgcctcccctagagtaagctgcacggttctgactagctccgatagcagccaggagacaattgtccttcccatgggcttctgatttatttaaactatcagggtaataattagcagaatttcacggttttaaaggatggcacttctgtttgtatctgagatatatttactctggcagtgtactggctgtttttgtgtcaacttgacacagctggagttatcacagagaaaggagattcaggtgaggaaatgcctccatgagatccagctgtaaggcattttctcaattagtgatcaaagggggagatccccttgtgggtgggaccatcgctgggcctgtagtcctgggttctataagagagcaagcagtgcaagccagggaagcaagccagcaagaaacatccctccatggtctctgcatcagctcctgcttcctgacctgcttgagttccagtcctgacttccttcagtgatgaacagcaatgtagaagtgtaagctgaataaaccctttcctccccaacttgcttcttggtcatgatgttttgtccaggaatagaaaccctgactaagataggcagtaattcgctttcactcttcaaatgtgctcaaaaagaagtaagcatcccataggagtgtagagagcagagtcctagtcagccagttgtgtcctaagaaaattaaaatgggggtgagatggcagaattagcacagataccttatgagagataaaatggcaaaaaataaactttattctgcctggacatctaggttaagcaaatatttggggcgcacattgtctcagtggcatgtccctataaaaatagtgatatctaccctaaaatcagggatctataaagagtatttatttcagcttcaaactttcatgcctgtgaaatgagtaaacttctttacagtgaatgctatccattgtcagttcttgggatctaagtgcctttgctttgtaggtggaaaaggatggatggaactatttcaatttgttgagacattagagcgcctgtaaaacaatacatttatgatctattttatgatgtgattaaagctacttgccaataagtgtgttggttccgtcgtcatagtttggaagtccagtgcatcgcacatttagaatgttaaacttgcttccttttctcttcttgaatctgaaaaaaaaaagtcaccatttttagaacatagaattggaagggattttgaatatgatatgtaatctttcactttatatgaattgtggtatctccacacacaaaaaaataatatgtgatgtcctttggactttttaaaaataacttttcagtaagcagttcccttctaggttttgggagcaaaaactcagaattaataaaaattaaaagattatacaaaaaagaatcataggtgacaatatgtctcaggatggtgaattgaattttgtgttggcattttaataatatatgaactcactcaatcatgtagtagaaccaacagttgagaaatttgaaaggaataatatcaggttattatccgattcatagaggatttttcttacttggttcatgactctactgaatctatgtgttgtgggtggtgcaaacttttttctttcatttcttcttagagcgtccctggggagtcatttggtaaatgtttttaagccttccataataattatctctgagccctaatgctttctggttttggcacgtcttcattctccaattcaaggaaggagttcagaatgacttccagttgtaaaatgaaatactaatctaatttaccacttattttctgtttgtgtggtcttggcaaactttactgggctggcagggcacgcagtttcagggagaaatgagagcctgtctcaactgtgcttccagccttgcctgttagcttagagttttaccagaatttagggacagtccacagatacatcaaatatctccaagaccatgctgtatagacactgagaacgcaggcctttgtaagatgtcaagttcaggaataatatacttaaattattttagaactggaggttttaatcatttagaatgttgacttttttcctgcatgagcatatatgtgcatgaacacttatgtatgtgaaacatgtgtgtgtgtgccatggctttcacggaaaggacaaaggatggcctcgggcattggtccttaccttctgtcttgtctgagagcgtcaaacagggaaagtaatagcctacaagcttctggaggttcctttgtctctgcttctcatctctctgtaggaacactgggattacagaccctctcatgctaggtgtccagtttttatgtgaagactggagattcaaattcagatcctccttcctgtatgtcaatcaccattggccccgcccctcatttagaaaggtctccgaagaagggatccccacatttgctcagtgcgtgatgaagtttctttacaccattaatggtatgctagttttttccgtttatagaaaattaaagaaattatttaaaaaattaatcagcatctttaaaatgtggactcatttttaaatataatagttgttgttaacctttatatctgactttgtatttctatcacctgctcacttccagacaatcgaaaatctgactacttaaaacaaaagttcttttttctaggctgaagggaaaggtcagtgactaagagtgtccattgccctatcagaggacgagagttcagatccgagcacccatagcaggtagcttacaaatgtctataactagctcaaaggatctgacacccctttctggtctttgtggaaacccacacatgtgcatgcttgtgccatgttaatgtacatatgtatacatacactcacagttgagcgcacacacagatacacagacacgtgcacacacaaatgaaaaataaaataaatcttaggagttcttttttcttaaagaaaagtgttagtcttctttcgcgacctgcctgcctgggttataatttgagtctttgagggctttttctgtgatctttggctttggagaagtcaggctacatttagctaaaaccagatgagaatctaatctgcacctccacattgctcctttaactggtaattgaaatagatggttgaactgggggttggggggagatgctgatcttattgcctggaccacggctgcatgctcgtttcttatgcttcttcatatgaatttacaatgctgaaaatggatatatgctgagtatatgaaataaaacattttattagaatgataattaaaggaacaatcttcatcattacactcactaaatcatataacatattgatattaatacttgatagagcggtttttctccaatctttattagattcctcccaaaaaataatagaattctataatcataaattcaagccaaaagtaaaaagaataataaacagcttagagttctgtctttcatttctaaaaaatagattaaaaataatagttggcacttacactgcctttcagaagttggtctaatgacttatcagtcagtactaatgtaaatactgatttcaacttatgcacatatatagaatgttttaaaataacttcatttgaataaaatgggttgaccataccatcatatgattatatcatgatctctctttgttcttgttcttgaataaaatatgtcatacagtttgtaattctgtagtcttccaaatgtagatgtttattcctaaggagataggaccttcgggcaagcctatttgtagtgtgggaactacattatagcattacccatgaaaacatcacaaggactgggatctcagcaagatgtcctgtgagtgcatggtgaaacttcaggagatcctcatagcttctccatcgcacagagcatgttagaattgtactggcttgtatatagccatatgatttaaaatatctgttcatttcaattatcctagattaacacagaaaaatagtatcctttactttcagagggaagtgccaagatttcatagagctcaagattttccttagtatcagctaataaatacaaaggagaattaagtaactccagtccttgtatatagcttccctattatctgaagtttgtggctgggtaggatttccacgaattagcacagcgagatttcagacagaggaaagaactgtcgcaaaggcacaaaggcacaaccgcgggaggtatggcatggtttcaggaaaatgtccgtggccagtgagctcacattcaggctgaagagaattagcaggcagatggcaatggaatactgtagaaagatccatctggaacggtttcatgggagcactggggacgcagttggtcaaaaaacattaatgcttccggattacatgggagtaggggttaatgcctgcccacgtctggtgaaaacggatgtgtaagaagccagggcagggtattggagacatttgggaggacgtgtcaccctggtacaaaagcaggaagctgaggaaggagtgaggtgtcatcagaggtcacgtcaagatacaggtttgagtgacagggaagtcagagccaaggaaagaggtaggaaaaaaaaatcagaagaaaatgctaaactggagggtgtgtaccaagaagctgtctgtggtttggttgggtgtgggtagggcttgcaagtagccaagtcttagtgaaatcagaaaacttccaccgtgcttttggaagccattgccatgtcaggtggatgtttcgggaacagatgaggggatggcggggaacttatttcagaaggacatgcagggagatgccaggtcagtgaagagggcctggactcgggtagcggcgtgagggaggggctaaaacagagtgatggtctcaggacccctgcagagcttcatccaagagcagagaacatgcataaaccacccagtctctagcatccacctggtaaacagaaatgggacactctgtttttgctttgtttttaggttttggttttttagatattttgaattctgtgagagaagaggtaggtaggttgataatgattcccccattctcttagccctgacattttactaaagacccagaaactgattttgaattcaattcacatattttctccatgatatcaaagtttactcctcttgtaccatcactcacttgttttataaagacaagagcgcttcaggggaaagagtggctatttgttagcattctgtctaaactccaccctcacagttacctggcaacagccaggcatgctcctccccacagttacctggaaacagccaggcatgctcctccccacagttacctggaaacagccaggtatgctcctccccacagttacatggcaatagccaggtaggcctgacccactataaaaggggttgcttgccccctcctctctattgctctcttgttctcttgcctctccctcttgcttcccctttctctccattcccttccctcctctcgccacatggccatggctggcctctacatctctactctctccctctctgtctttctctgcctctactaccctcttaactcccctccccatgtcctgaataaactctatattctgtccctctgggggaagggatgccctggcatgggcctgctaagatatcactttccatcataccttttcacacccccatagaacatatccccttatctctctttatctttttataaacagatcactatttgttcatggatttttatcctggtattgaatctcagacccatccctttgtaatttctgttccttcgaagtaggtcttggtgacaggcaggggcacaattccagaaaatggggtgtaaaagaagctctgttggtggatccttaaaagattgctcaagagtaacctctgttctgtgcaactgtgatgccaacaaagtatcttataggtagagtagccttctcacgggtacgtgggaggtggccagaggggtcctggcatgtcagggatgcagagcagagagatgctgctcagttcctccatggaacagccacacccctcgaatcaatcctgtgtaacaatctctggacgttttgttggccagaattagattttccctcatgtcgaaagccaatggagccatggttctgttgttagaaacattcaaagggcacctgaacgtgcaaagtggctaaagacatgaaattgtcattttaatgttatttctgtatttgtaaaaatttctaagtcgacagtcaaggaggatgcagaaggggtgtcattcctcaaggaagcaaagtctttggaaggacaatgaaattcttcggtagagatgctgagaagccccaagctaagcctgacagtctctgcattctgctaagcaggcttcagttggcaaatcaaaatttgagcaggacacagagttgccccggaaggtagtgttcgccctcattgcccaattcaagggacttctctgttttcactgttcatttcggcattttcctcagcttttgtctgagccatacagatacattattcatttccatagcacctagggtcctgcatcctaatgtgtttacagcctatgcagaagcctgtgtctgctcataggaacagagcgctggcgtccatcatgtgggagaaggactggaatgctgatgagctgtttggagctcaccctggcgtcaggccccccccatgcatccaccatgcccctaatgcacttgggctaattataagtcatcactctcattctttccagagcctaagaatcaggagggctgtgggggcagattcttaagcaattgtgcaatctgccatcatgaggaccttttacaattcagttgctcactcttgttaaaatctgctgctcagtagtcttccaatcccaggaagccctgttgcgcattgctcaaagttaaaaacaaaaacaaaaacacaaacaagcaaacaaacacacaaacaaaagaaaccaggcagcaatggcatccaaacataaacactgacagaatttttggatttccctttagaatgggttttaaacctggtaggtaggaatcttttaaatcttgttgaaaaagtcctaaagaattgggattctgtttaataaactgcaattaacagttgagaatcccactcactacttcttttaaagtgacatttttaaagacttcttatattacaatattctcaagggaaagtcctgttaaaatatcttcagattcctgagacagggaagagtcagcccctgtctgcatttctaagagcttgggttacttctgagcatggcaacacagctgtagcaaacaccacgagctgttctacaaatagaaaaaaaaattacatacttagaagttggctagtctagagctagaatgctgcagatttggagtccattaggggcctgctttcttggtcattcacgatacctttgtgctatagccttacatagaagcacgaatagagaaatctctggggttctcttctaagggggccagcccatccacgaagcttccgtttttcatgctccaatgaccccacaaagcctttctcaagcccatcacacaagggtgagaattttaacatacataatttgcgccccctgtggtcatcttatcttttctactatgcttcaccataatatctgtttggttctttacataggtcacgtgaaagctaagtaataataaaacatagctagagggtttgaatctgagtgcaatatagtcatagcctttttttgttccctccttggattgatttctgggtagaattttttaagacggggctggggaagatgagaggttcagtggcctaaggcagatgaagtctgttcatgggaaagtaagataattaccccatcaacttgaagttgcttagaatgtcaacatcaataaccgtccttagagctctgtaacctgacggtggcaactacagaaccataaagcaaaaaaaaaaaaaaatgtccattagggttggtgacaaggccatgtttgcttccaaatcttgatttttggaatacctggaggcagcttcaggtctgtgatgtgttactgctatcctccgaggattcgagggacacagagagctgatattcttttagtgatatttcaatttcattatctgtatgtactatttgggtccagtttgatagaagcatgtcactgtaggggtacagagatgatgacaatgaaaagcatggtcaccatctattgctgatgaagtgtatgactgtacagcctggtttatgttggagattaacaatatagtttgatgatctttcttgggtatgatagaacattccaaaaacttctgtctatggaaaaattggtgctatccacccacactgattatgacagaggcagttcactaaatgcatatcaaacgttcataccatataaaaagtgggaatcctcttaaataagatggccagtttcatcgattttatttatatacacacatagactctttctttctttctttctttctttctttctttctttctctctctctctctctttcttttccttccttccttccttccttccttccttccttccttcctccctccctccctccctccctccctcccttcctttctttctttcttcttctctctctctctctctctctcgctcacaagcacacgtgtacacacacacacacatacacgtgcacacacacacacacacccctttcttcatggccttaaatattttcagagaattagaaattgacctttaaaccaaggattttcaattatttcactttttcagatggttttcatttgtttgtttgtttgtttgttttgtttatgtacaagtatgagaactgggccagggctgtgactcagtgatagaatatgcacttagcatagagaggcatgactgtaatctctggaaccacacacagaaaagtcttgaaacttcttttactaattcgaccttgcacaaagcctcaactcattgcggctagaccaaacagaggcattctcagggggtgagacggaggagtcgaagtgtaaagatctgggatgatttcatggtccatctttttgcctcttagatatagttttccttaagtcttagcaagagaatctatacttcagacttccaagtctgtggcaccagatcaatgagtctgtctgtgatggtgaggatgtcagcctggccagcattcatgctggagtccctctccctggagttccctgtccacacacactttccatcatgacattatttcgagaacatgtgacacccgtcttccttctctggtcataccatatccttcaaggctcgctttatttatttatttatttatttatttatttatttatttattttctgtagactgttttcggatgtctctccatgttttcctgcttccaaatcactggttaatagctcttaagcttttaaatctggtatgccaataaccaaggaaaactcaaattgagttgtgcttaagtagggctgagtttatgttatgtacttacgccaatatacgacttgggaaatgagtgtaaggactggagagatacctcagcggataagagtacttgctgctctgacagaagacttgaatccagtttccagcaaccatgtcaggcaggcttgcaaacccctgtaacttcagctatagaggattaacgcccttttggggactccatgggcactcataccaatctgcacatattcatatacacataaatgaagcaaaatatttgtaaagtataaaaatagaaatgaatacatgtaaatagatacataaattacacactcatgttttctcttaattctttacgagttgctttaatcaccctatagcacgtgcacacaatatttttgttgttttactttgtgtatggtacaacttgatctcaggacctcgtatatgttaggcatattctctactactgaattaaaccctaagccccttctaattttgagtgattaatatgtgtcaaatagtatatcattttattgtcaaaatgagtatactcattcagagtgccttggctgattagtgaatcatgtttgtggcaatttgtgttgtaggctacctggttcaacattataaccaaaataagtagcttgaaatgtaaatatatagtactcctactaccatattgcagtaagcaaaggggataggtcttctaagaacgggagcagagggggcctgccatacatggcctctctagcttcagctcattagtccatgggaccctggaaacctttggaagtttttctagctctaaagatttcttctcaaccttggggttatttctaaagcaagtaaagtgaaggaaatggtttaagaaatggaccggcactggttcttgaggcttggatttccaaactaaatcctacatcccctttggaatgtgagtgggggcggagacgcttcctgcatgtattttgagatgggctgaggctaaggtggggggtagagctgaagacgatgctatcctcttaacctttaccaggcccgtcatgcccactgtcttcagatttctgctgtatattttgatcctgtctccacagcagttgcttacgaatgtgttgccaataatgacactgaaaatgtggtgagcatataaatagctctttgtgctgcagagatgtcgttatttaggaagtcttaggaggctctggcagaggatggagatacagtaaaacagtttgtttatagaaaaaaaccctaatagttataaatatcaaactacaatcaactaaacatccgatgtgtaataaaatattgaatatttccctcgcgtgataaggaaaagtcttaaaattaacattcctacttgaaaactgcccatgaaaataaacaataggtggatatcttctaaatgttttcctcatgtaactttgtgttagtgctatagggagataaatagcaaagtatatcaatgagccctggttcacaataaatacccttttcaaggacttcttaattcatttattttacatcataaaatttaggttcattatgaaaagcatcctggagatccactcgtgtgttatagctgtttcttcagacagcggcttgagcagagtcagcagactgcagtttaggacccctattttgtttttttttttttttttttccaggcaaaacatttattttattttttttttttttttctggtgacatggttttttattccttgttttgatgatcaacttctaacacagctatgtctaaggcatcgggtgttcttttcttttttttttttttttttattaggtatttagctcatttacatttccaatgctataccaaaagtcccccttacccacccacccccattcccctacccacccactccccccctttggccctggcgttcccctgtaccggggcacacaaagtctgcgtgtccaatgggcctctctttccagtgatggccgactaggccatcttttgatacatatgcagctagagtcaagagctcaggggtactggttagttcataatgttgttccacctatagggttgaagatccctttagctccttgggtactttctctagctcctccattgggagccctgtgatccatccattctgaaagtaagaaaactcccggacttcaacttggatgtgaggcatagagctcatgcccatcttccttctgctatgaggcaaaccacgtagcttatttctctctgattcttacaaacttataaatgaggcaagagagatggaataggccaagggcatgagactgttcttctatgtgtgatcaatgctggacagtgtcgagttctacctatctctctcgatatggaagctaattatgtttgacagtaatttactgaagcgcatgtttatttgcctagttttatctcagaggatagaagcaaatttcttgctatataaacatgtgataaagaaggcaatggcatgctgtttatgcaagtctcatgtcttatgtgacacttggtagggagagaaaatatagggcatctgaattgaattctcagcatcccgcttgctttcttattcatttttgttaatagaaatcaacatcctaatgacattgccgccgccattttgttcatctgggtcttggctaaccccttaacttgggacgggtaaggatttagcatcttttagttttaaaaccccaagtcctccatctaactttctaaacaccaacgacgtaaagcatctagagagacgttccactcccaacctcatgtgacaaagctgtaaccaaatcttaggcacattaaaaatatttttaaaattatattcaggatttatgtataagatgtatacgaaacaaatgttttgtgtttagacttaggtatcacctcagatctatctcattaaaaatacaccagtatttggaagtctaaaactcaatgcacataaccactttgtataagtgatacgcaaccgtaagtagagctcttgaatgttatctgataacttgccctctgaggcaaaagctacttaacatgagcaaaaattaattttatttgctgattttaaatgccacttagtttgctcggaagctaaatttttcaacgtgctcgtgaaaactttgcaagagtaagtaaagcatgctaaaccttgaggagaacccctgcaggaacaacatcgtgaaatgaaatgcaaaggccgaaatagggctgctgaagtttgctttggcccctggtactgtaattgcagcagtgaactcattctttctcccatgtcctgtcactagccatggagtacactggccagtaggggatactctaggcattcttatagctgagtggtggattggagtttgaagaaataataaagaccatctttctatatagctgtcgtctgtgtgattttggggacccctgcttaaagctcggtctttgtggtgacttcctctgagcaatctttcaagcaacttttatgtcattcatgtgactgtgtgtatccttgccagttacctgtacttcattaaatgaaatacacagaagaaaactaaaggggccctataatctaaatgagcatcattgtgggtgggagtggggtggtgttctcaaaccctgaggttgaattccagatatcctccaaaaaaaaaaatgtataactacagaactctgctcatcttagaaaaacaaaagacaattgtgttgagttaatctaaagatgctgccaggtaactctgattttagaagatgaagtggactttgggaaggagaatttggagagaaaggaaaagtgagaaaacaattttgtcatccatctttggggaaaaaaaaggcaaataaatagagttcaaataattttcatggaaacaatttacaaaacatatactttgtattggaagtatgagttagtagacacaaactgcttacgagcactggacagaaaatttccctagaataaagtcttgacacctccagaagtttgccctgtagtgttaaggggtgattatttcaatgttctaatcacattcttgcttgtgtgtaggcactgtactgctggtataggaagcaatcagaacccaaggatccaaagcagggaccagagcatttaaagcaggaattggaccatctcatgtgtgctgtagctgtgaactagccctttggtgggatcaatatgaatgttaaaatcaatggcttgttcattgtgactgatacctctaggcatgttgcggaattacttggggttacctgacacgggtcagaaaaaaacaaagctaagtactaaaaagtatgtttgaatagactatcagagtggggcggggagggggttcctaacctatgaagactctcaaccctctctcaagagaatgctggaagctctgctttgagggtttgggagttgggagaagctgttctcagttgtggttttcgtttttgtctttttttttttcttgttcactcttcagaagaacctgaaaagtaatttttcactttcctttcctgatatccagatgccaagcatccagccacacaagcctctcctgtgcctttcattctgacccttgagtgacacagcatttaatttctcttccgttcaccttgtccttctagttcttggaaggaaagatgtagacatgtcagccacgtattcatccacagggacctggtgggtctgtttatctacgaagtgattcagtctcagtcacttagcccatcaagtatttgttagagctctgcaaagcggggtacttcatcgtggtgctggtcagttggggtgagtggtagctgttgtggtgacgaggggcaggcagtggctgggtctgcagctagtggggtgtcatgcttgtggctgttcacgatgagtttatccctcaattctaggtcttttctcaagggactgacagaaaagctagtggtggcaaaacttaactagagaatggaatgtaagtgctacctggtagatggttacatgaatgtgcagcttgctaatacagaatgtatagatggggtcttacctggacatttgaaagacgttctagtaaggtataatctataggttctctgcatcagagccattggagaagaggaaggagaggatttacatgtgtgtgtgtgtgttatatttctatgcaataaactttatttttgggaagggaggaagggagggaaggaggaaggaggggcacatacacacacacacacacacacacacagagagagagagagagagagattttatttattgatggaaaacatcttttctaggttaggaattgaacttgggatgaatgtttctgccaaacacaaagctttcgattaaatagtaaaaacttcatccgaaattatattccgtttgtctcaaaacacccatgcatgatacatgtacacacatacatgttggcacgatatcaagccatgcagtgatgccatgagtttgacagtgataatttatcctccttgacctctggagtcagttgaggagcctcagaccaaaggacctgctctaaaatccagccctccattttggattcttgagaaaacagaacagagtagagtttcaaagcgtagaagagtagccagaagtttggcattaataatacttttcatgagtcactttagtaaattatgtactcaggaatccccactttaaaataatttctaatctgtacagggaagagaataatacaattttcctattatatttatatgtgtatcattgacaaatgacatttgaaaatcttgattatggccatgcctgacattgtgtaattacatagcaaattatatttagcaattattttccaatatagtaatttcaattaaaatatttattaaaatttcaccctaatggcaatctagcaaatagtttcaagctcataaacatactaatatgttgcttaggagttttaaaccaaatttaacatatatgtcataagtacattcaaatattttcaaaactgatgatctcttttgtcctagtttacaaacaatattaaaatggtaattaaaatcaaattgttaaataataaaggtgtaactcaaaaaaaaaccctcccttgtattgtgaaagtaaattgcaactcttgcctggagaaaaattgaaggtatttgtatttattttatgacttactattctaatatcaacagcaggcaggtaaggcaggtgaaagacgatgtggttgggtactaaataccctgcatgaacggaaatagccacaggtaagctatgcatcttgaagtgttaaaatacacagatggtgtgtcctgagactacacacaggaaagaggaggctgtaagctttgagagaaaacatacacaactaccataattattttagaaaagaaattgtgttatgttagaaagtcagtctaaaacgtccagtgttggagatttgtggaatctctggtcagaaagcgttgaaagccttcagagcagaacaaaggcgtggtcttcagaagtgattttccgtcactgaggagttgttgggccacaggactggcatgggattctctgacagattggcagttgggtggaaaattacaacaagtaaattttcattctgagacttttcagttttatcagttatagtaggagagattaagagagaagagtcattcatgatgcacaaggtgttcatcatttttaataggaatatatctgaagtagtgtgctttgcatttttttcttttataatttgttgttttaaaaaagctcataactgtattcttaaatggacacattgtcatgagcaagataacttttggtaattgtaacaggtaccctttcaaaaatgtttccagcgtgcctggtattttgtgttgaatgttttctcttggaccctacaacagcttccaggtagatacactgttaccacagccaccctggaatttagggctctaagaaccttccaaaagctctcacagttggtagttatattataactaaatgacctgctagtaccatttccagacctgctagcacctacataagatttaggtatgaggcaaggctggcctcgttccattatctggtatccttatggctctcaccactcactgttgagtcacataacacaggaatttaagagacgctttctagcaaaagagaaaccactagaaaaaggaaggttaaataacaggatggcagagccttagcatatgccttgtctctagagaacctgtcttggtnnnnnnnnnnnnnnnnnnnnnnnnnnnnnnnnnnnnnnnnnnnnnnnnnnnnnnnnnnnnnnnnntccctccctccctccctccctcctttctttctttctttctttctttctaactccagattttattcccttcccggtctggcccaccctccaactgttccacatcccatacctcctctctgaccccatgtctctacgaggatgtccccatcccccacctccaaccccaccagaactataaactccctagggtctccagtcacttgagggttaggtgcatcttctctgcctaagcccagacctgacagtcctctgctatatatttgttggggttgtttccagcttctggctatcacaaacaaggttgctatgaacatagtggaacacgtagccctgtggcatggtggggcatcttttgggtatattcccaagagtggtatagctggatgttcaggtagatctatttccaattttctgaggaacctccagattgatttccagagtggttgtaccagtttgccatcctatcagcaatggaagagtgttctttctccacatcccggccaacatgtgctgtcacctgaggttttgatctcagccattctgattggtgtaaggtggaatctcagggttgttttgatttgcatttctctgatcactaaggactttgaacatttctttagatgtttctcagccattcgagattcctctgttgtgaattcttagtttagttctatactctttgtgttgtttgggttttttgttttgttttgtttttgttttgtttttttgtgattagcttcttgagttgtttatatattttggatattagcccttggtttcactatccttggtgctttctaacctgaaaggactaattaatgcaacagttctctagccatgggagggagggagagaggaagggaggcatagagctgaatgcatatgtaacatttgtgtgcagtatgcatatgtgactatattagatgtctaagattttatatatgatatctatgagtgtgtgtgaatatgtgtgagatgcatatatgtatacatctgtaatatacactgctgagtttattttgtgaggtaaatgtatatgtaatatgcatctagggtatgtgcatatatatgaagtgtatattcatgcaagtgttctctataggaggtgagcatagatacgtttacctgtgtaagcacactgtatatatgagtttaaacagagtgtccaatttaaattatatatgtgctttgctgtgttggggagagtagaaagaggagaaagaggagaagtgtggcagataaacatatctgagagttctactcactagactagctataaatatacatgctgtagtcttgaactttggagtcttgggtaacaccccaccagctctgtaactagagattactatagatattacagtgtagggatgcttacttacacattaatttttttcaactctggaaatctctaagggttgagtgagtattatgcaggctgaaactgctagtaaccttcaaaatgccaagccaacataaaattctgtatattttatttgaaatattattacccccaaattatgttttacagtcaggttgcagaacagcaaaataacatggggaacatcctaatgggagacctaccattctatgcctctacctacaagagctttcacaattgattttcattactacaaatggtatattgtatcagaaagaataagtatgtaggacatctagtgtgtggcttttgtttatcaagtaattgcagtgtgaattcatgaacaaacaaggtcattttaactagaagctgggtaccaaatgtgggtctctaaaataaagcctttagaagctttgaagatggccttgtttcagataatcattggttggacatagaggaatcagtaggaaaatataggatatctcatttcctgaaatggttgaacatagagttagcatatgatccaataactccacttacaggaatacatcaggagaagtgacagcatatcccccaagtattgtgtgccaatatttgtagcagcaagttttctaataaccagaagtagaaatagattatcacatgaagaatagacatagaatctattcctacagcgaatattagtaaattggaaaagaagctctgtcttcagacagaatgcctgctgccacatggatgaatcttggaaaagagccagcatgacattattgcatgacttggtgcgtaggaagtgtttagggagtagatgcatcgacagtcagaaatgagtggttccacgtggctgcgtgagggatggatatcgaaagctgaaagggtaaaagacttcttaacatagtaacattttctaaacagtgggaatgtgttcacaactgtgaatagtggaaggtcattgagttggacattaaacaaaaaaaagttgggctgtgtgtcaattggtctgtgtaaaggcaactaagcaagatacgggacaatcttcctaagcagtgagcccccactttatttaatcaatagttctcagaagatctgttcataaacttcctgacagaatcaacatatacagaaaggagagatggcctttgtaccagaaagcacctcagacgacgaagtcagcctgtaagctaatacttcctcaagggtaaagacacagggccagactcccctcccctcgccacccttcctttccccgtgtctacttcttttatttctgctccttttactttttttaaaaaaactctttatatatcaatgaatgttgtaatgtcttaacttagaattgtggctaatacatactcacagcgcctgttttcagtatctctgtgactttaaagcattttcggagatgagaatgggctgatgaagttggggcagatcctctgtgcttaactgttagtttcctctgggtctcctccttctgtcctactcccttgcttgggcagtgtttcttctacccacccagcagagtgtcctgcctatcctctcagccctcccccatctccgtccaaatattaatttgctacagtttcagatgctttccttgggatggaatgaatgtatttccctgccatatcctcacatacaattactgactgggaggggggaaaaccctgtctttgtcatttaattgaagaattactagttcagtacgctgctataggaacctgattattggatgtgtttcttccagtttcaactttgaaatattggatgatgcctttcagttcaagaaatcaatatttctgtaaagtgtcttcgtgcaacgaacgtttctggaatgttccccttcaattctattactatgattaagtttggtaaatctgttttggctacgtaatttgttaaatggtatttctgtgaagttctatctatgtcccttaactgtcagaatggaattactggcttaccaggcaaaataaagcagccctgtgttaggttcatttgtgtttctaatagtctccataatataacttgaagaagaaaaagcaataagatcttaacttcttcacgaaaatgagtattgtttttgaacttcaactcataaaagtattgaggtctgggcaatagtatacatgacagtaataatcgagttccacggaaagttggcacctcttgtctgatgacccaagggctccagagattgtccagagatctgttgctggaatcccacaaccattcactaggtcagaagaagtccatgataaaattactcccccttctttataacagaaatgagagaaaaatgaattttggctgactgttaaataagacattaagggtgtctgcttatagtagaacttgatagcaaatgcactattaggctgatttttattctcattcatccattgttttcattaagtagatcaattgttgaccagcatatgaaatggtgctttataaaaaattcaacatattcattaggtctaggtttgtagttgcaatccattttatttaatctttgtttatttttcccttgttagcaagttcctggcctttgagacactgaaaagtatcacttgtggagaaggttggagtggatagatgcagttaacattgcaaattggtaacaggatgaatttgttcttaaatactggcttataaaggcactgtcatggaacaagctgtttgactcactatgtgtttaaaattttatgtgcacacatatttagcacacaaatctacttatttatttaaagcagctttaagagacaaacagcttcaaagagcaaacctccactcaaggatgctgaggtctgttgtgatttccacgtgtgtttccaggttgctcctcacttaataagggacagttgtcttgactggctgctgggagctcagtatcccagagattcaatctttactggtattccaaaacaacttcagccactgacttctgacttctacctcctcctgctagatattagaatggatgagcccagaaatagcttggacccacacacagaataggtgaatgaaaagagagcaagtggtttgtaagagtaagagcagaactaccttctctcatatacacaacaaacttttcctcttggctcatctacacaatctggtcaattgtacctccttgtgctcctttaagtggcctcgctagacccttctgaaatgttaccttggttcagggatagcctacccatccttatcctttggtttcttatctcaattatagaatcgcctctctggctatttattatcttctctaatgatttcaaaatccagtctagctcttccgatccaccccccgactgctcccactctatttccctctactgggtacccattactttcccaaccaattttagttgcttatctttatctccaaggccattcgccactgtgctctgctcttgtgagtttatcaccccacgttccttctgcttgcccttctacgaacatttctaaaggataacagcgctttgaagctgtacactgctcctgccttgaagagctttaatatcctcctcaggtcttctcatgcaagaaagtaattggtctaaagtcccagagtcacccaggtaacatcaggaaagtcttgtgatttatgcacaactttctagagtggcctctgttgcttcccatcacaatcaccatccacttatgcataatttaatggaggtccttaaatgtctgtcacatgaccaagttgtttcttctgcagtaacaagtatctaagtatcgatagggataagtttcttatctgaagactctgacgacatgattgctacagaagtctaagaaagtacttttattccataaatagccagttcaggaaagaatgtcagcacataagacatgccttttctttgttgtgtcgaacttgcttttgggaaagtattcttcaagctgaactttttcactgccaagtaagtacttcccttggtgtaagacatgtagttggaaatatagaaatcattgtaataatctctgcctcactgatacaactgaacacaggtgtaatttccttaactaaaccttttgtatcaaggagaatgcctcaattactttaataactcctcttgtggagattctgagaatgtccatacagatgtctcaatccttgtcttacaaacaattcacatgtcactgtcagatccagtgttgcctatagttaccatgtttaatcactgacattaaaggcaccttttgtaaccttaaaataaatcaatcattaagcgtctttatattttaattccaacaaaagctcaaattcatggccacctggttgctagcacacgtggctttagggctatttataattattatgtacagatgtatgannnnnnnnnnnnnnnnnnnnnnnnnnnnnnnnnnnnnnnnnnnnnnnnnnnnnnnnnnnnnnnnnnnnnnnnnnnnnnnnnnnnnnnnnnnnnnnnnnnnnnnnnnnnnnnnnnnnnnnnnnnnnnnnnnnnnnnnnnnnnnnnnnnnnnnnnnnnnnnnnnnnnnnnnnnnnnnnnnnnnnnnnnnnnnnnnnnnnnnnnnnnnnnnnnnnnnnnnnnnnnnnnnnnnnnnnnnnnnnnnnnnnnnnnnnnnnnnnnnnnnnnnnnnnnnnnnnnnnnnnnnnnnnnnnnnnnnnnnnnnnnnnnnnnnnnnnnnnnnnnnnnnnnnnnnnnnnnnnnnnnnnnnnnnnnnnnnnnnnnnnnnnnnnnnnnnnnnnnnnnnnnnnnnnnnnnnnnnnnnnnnnnnnnnnnnnnnnnnnnnnnnnnnnnnnnnnnnnnnnnnnnnnnnnnnnnnnnnnnnnnnnnnnnnnnnnnnnnnnnnnnnnnnnnnnnnnnnnnnnnnnnnnnnnnnnnnnnnnnnnnnnnnnnnnnnnnnnnnnnnnnnnnnnnnnnnnnnnnnnnnnnnnnnnnnnnnnnnnnnnnnnnnnnnnnnnnnnnnnnnnnnnnnnnnnnnnnnnnnnnnnnnnnnnnnnnnnnnnnnnnnnnnnnnnnnnnnnnnnnnnnnnnnnnnnnnnnnnnnnnnnnnnnnnnnnnnnnnnnnnnnnnnnnnnnnnnnnnnnnnnnnnnnnnnnnnnnnnnnnnnnnnnnnnnnnnnnnnnnnnnnnnnnnnnnnnnnnnnnnnnnnnnnnnnnnnnnnnnnnnnnnnnnnnnnnnnnnnnnnnnnnnnnnnnnnnnnnnnnnnnnnnnnnnnnnnnnnnnnnnnnnnnnnnnnnnnnnnnnnnnnnnnnnnnnnnnnnnnnnnnnnnnnnnnnnnnnnnnnnnnnnnnnnnnnnnnnnnnnnnnnnnnnnnnnnnnnnnnnnnnnnnnnnnnnnnnnnnnnnnnnnnnnnnnnnnnnnnnnnnnnnnnnnnnnnnnnnnnnnnnnnnnnnnnnnnnnnnnnnnnnnnnnnnnnnnnnnnnnnnnnnnnnnnnnnnnnnnnnnnnnnnnnnnnnnnnnnnnnnnnnnnnnnnnnnnnnnnnnnnnnnnnnnnnnnnnnnnnnnnnnnnnnnnnnnnnnnnnnnnnnnnnnnnnnnnnnnnnnnnnnnnnnnnnnnnnnnnnnnnnnnnnnnnnnnnnnnnnnnnnnnnnnnnnnnnnnnnnnnnnnnnnnnnnnnnnnnnnnnnnnnnnnnnnnnnnnnnnnnnnnnnnnnnnnnnnnnnnnnnnnnnnnnnnnnnnnnnnnnnnnnnnnnnnnnnnnnnnnnnnnnnnnnnnnnnnnnnnnnnnnnnnnnnnnnnnnnnnnnnnnnnnnnnnnnnnnnnnnnnnnnnnnnnnnnnnnnnnnnnnnnnnnnnnnnnnnnnnnnnnnnnnnnnnnnnnnnnnnnnnnnnnnnnnnnnnnnnnnnnnnnnnnnnnnnnnnnnnnnnnnnnnnnnnnnnnnnnnnnnnnnnnnnnnnnnnnnnnnnnnnnnnnnnnnnnnnnnnnnnnnnnnnnnnnnnnnnnnnnnnnnnnnnnnnnnnnnnnnnnnnnnnnnnnnnnnnnnnnnnnnnnnnnnnnnnnnnnnnnnnnnnnnnnnnnnnnnnnnnnnnnnnnnnnnnnnnnnnnnnnnnnnnnnnnnnnnnnnnnnnnnnnnnnnnnnnnnnnnnnnnnnnnnnnnnnnnnnnnnnnnnnnnnnnnnnnnnnnnnnnnnnnnnnnnnnnnnnnnnnnnnnnnnnnnnnnnnnnnnnnnnnnnnnnnnnnnnnnnnnnnnnnnnnnnnnnnnnnnnnnnnnnnnnnnnnnnnnnnnnnnnnnnnnnnnnnnnnnnnnnnnnnnnnnnnnnnnnnnnnnnnnnnnnnnnnnnnnnnnnnnnnnnnnnnnnnnnnnnnnnnnnnnnnnnnnnnnnnnnnnnnnnnnnnnnnnnnnnnnnnnnnnnnnnnnnnnnnnnnnnnnnnnnnnnnnnnnnnnnnnnnnnnnnnnnnnnnnnnnnnnnnnnnnnnnnnnnnnnnnnnnnnnnnnnnnnnnnnnnnnnnnnnnnnnnnnnnnnnnnnnnnnnnnnnnnnnnnnnnnnnnnnnnnnnnnnnnnnnnnnnnnnnnnnnnnnnnnnnnnnnnnnnnnnnnnnnnnnnnnnnnnnnnnnnnnnnnnnnnnnnnnnnnnnnnnnnnnnnnnnnnnnnnnnnnnnnnnnnnnnnnnnnnnnnnnnnnnnnnnnnnnnnnnnnnnnnnnnnnnnnnnnnnnnnnnnnnnnnnnnnnnnnnnnnnnnnnnnnnnnnnnnnnnnnnnnnnnnnnnnnnnnnnnnnnnnnnnnnnnnnnnnnnnnnnnnnnnnnnnnnnnnnnnnnnnnnnnnnnnnnnnnnnnnnnnnnttgattatttcctgccgtctactcctacttgggtgaatttgcttcctttttttctagagcttttagatgtgttgtcaagctgctagtatgtgctctctcccgttttttcttgaaggcactcatagctatgagtttccctcttagaaatgctttcattgtgtcccaaaggtttgggtacgttgtggcttcattttcattaaactctaaaaagtctttaatttctttctttattccttccttgaccaaggtatcattgagaagagtgttgttcagtttccatgtgaatgttggctttctgttatttattttgttattgaagatcagccttagtgcatggtgatctgataggatacatgggacaatttcaatatttttgaatctgttgaggcctgatttgtgacctattatgtggtcaattttggagaaggtaccatgaggtgctgagaagaaggtatatccttttgttttagggaaaaatgttctgtagatatctgtcagatccatttgtttcatcacttctgttagtttcagtgtgtccctgtttagtttctgtttccatgatctgtccattggtgaaagtggtgtgttgaagtctcccactattattgtgtgaggcgcaatgtgtgctttgagctttactaaagtttctttagtgaatgtggctgctcttgtatttggagcatagatattcagaattgagagttcctcttggaggattttacctttgatgagaatgaagtgtccctccttgtcttttttgatgactttgggttggaagtcaatcttatcagatattaggatggctactcctgcttgtttcttcataccatttgcttggaaaattgttttccagcctttcattctgaggtagtgtctatctttttctctgagatgagtttcctgtaagcagcaaaatgttgggtcttgtttgtgtagccagtttgttagtctatgtctttttattggcgagttgagaccattgatgttaagagatattaaggaaaagtaattgttgcttcctgttattttagttgttaaaggtggcattctgttcttgtggctgtcttcttttaggtttgttgagggattaccttcttgttttttctagggcgttgttcccgttcttgtattggtttttttctgttattatcctttgaagggctggattcgtggagagataatgcgtgaatttggttttgtcgtggaatactttggtttctccctctatgataattgagagtttggctgggtatagtagcctgggctgcagtttgtgttctcttagtgtctgtataacatctgtccaggctcttctggctttcatagtctctggtgaaaaatctggtgtaattctgataggcttgcctttatatgttacttgacctttttcccttactgcttttagtattctatctttatttagtgcatttgatgttctgattattatgtgtcgggaggaatttcttttctggtccagtctatttggagttctgtaggcttcttgtatgttcatatgcatctcattctttagatttgggaagttttcttcaataattttgttgaagatgtttgctggacctttgagttgaaaatcttcattctcatccactcctattatccgtacgtttggtcttcttattgtgtcctggatttcctggatattttgagttaggatctttttgcattttccattttctttgattgttgtgccgatgttctctatggaatcttctgcacctgagattctctcttccatctcttgtattctgttgctgatgctcaaatctatggttccagatttctttcctagggtttctatctctagagttgcctcgctttgagttttctttattgtgtctacttccctttttaggtctagtatggttttgttcatttccatcacctgtttgtatgttttttcctctttttctgtaaggacttctacctgtttgattgtgttttcctgcttttctttaaggacttgtaactctttagcagtgttctcctgtatttctttaagtgatttattaaagtccttcttgatgtcctctaccatcatcatgagatatgcttttaaatctaggtctaggttctcaggtgtgttggggttccctggactgggcgaagtgggtgtgctgggttctggtgatggtgagtggtcttggttcctgttagtaagattcctccgtttacctttcgccatctggtaatctctggagttagtaattatagttgactctgtttagagattgttcttctggtgattctgttaccgtctatcagcagacctgggagacagattctctcctctgagtttcagtgctcagagcactctctgctggcaagctctcttacagggaaggtgcgcagatatcttgtatttggacctcctcctggccgaagaagaaggcccaaaacaggacctttctcagacactgtgttgctttggcagttcccaggtggtacagactctcacctaagcagactaaattcctaagttccttggagtcccgggaccaagatggcgaccgctgctgctgtggcttaggccgcctccccagccgggtgggcacctgtcctctggtccggaaggtggccggctgtccccggcccacgcagggtgctgcctcagcgcctcttcgcctctgtgcttccgcctgttccagaagctgtcaggttctctggcgcaccctctcacctgttcagactaatttcctaagttcggcgggtcccggaccaagatggcgaccgctgctgctgtggcttaggccgcctccccagccgggcgggcacctgtcctccggtccggaaggtggccggctgtccccggcccacacagggtgctgcctcagcgcctctgtgcttccgcctgttccagaagctgtcaggttctctggcgcaccctctcacctgttcagactaatttcctaagttcggcgggtcccggaccaagatggcgaccgctgctgctgtggcttaggtcgcctccccagccgggcgggcacctgtcctccggtccggaaggtggcccggctgtccccggcccacacagggtgctgcctcagcccctctgtgcttccgcctgttccagatgctgtcaggttctctggcgcaccctctcacctgttcagactaatttcctaagttcggcgggtcccggaccaagatggcgaccgctgctgctgtggcttaggtcctagaattttcacattgctcacacatgagcactttgggaattgctcagtgagtatgtctcctcaccactttgttccttgaaatctttgaagtcaaatctttcttggattttcttttttccttcccaacttgtgacattcgggtggggttggatcatcactaacacaactgagcttcatttctcttcattccactttgaaagggatactttagtatgtgtattttcctgtttgagaggttacagagccttctgaggagctaacctgatctagcaaaatagattatgtgtgtgtgcgcatgtgcacacaaaatgcacacaaaaatttgcttctatagtgacacatgaccctagaatcatatatgcattctcatttttctacttcctttttctactgatgctttccataaagttatataaaaataaaattataccaaaagcttacatgttttattcactaattatttaaggggaatgtatttctatgctaatttttattaaaatatttacatatatatctgggccacttaatggaagcaatcttatatagttttgtggtatatttatttttctatatattttctctaatatatttttgttggtagaaatatcaaaactacatttctcagtgaaatacattttcttagtggtatgccaatgttcagctttcttcagtcttatcgctggctgccttttgcatgtataaatcatatgatagaagacacagcctaagacaactgttagtatctgaaaggttgttgtaacgtgcatattgtgggtctatttcagtggctataggtatatctgaaagcattaatttccttatttaaaaaaaagtttgtaaatctccagtgtcaaaaataaaccatgtgtacaaatcatgtacaaaattgaagtaatatcatgaatcgtacagtgtatctacattgttttgaactaaccatctgtctttatcacctaaagatagaagtttgactagtactctgtttcctttttatatttggctttattttacctctactagatgaattattaatcaaaaattatagtctcatttctatggtaacctccatcatgcatgatttatagaatttgctgaatttaatggacacttccctttctggtttgaacctgtgatttttccagattgtgtacattttacagggagttatagggcttataaggtatttcagacctgtgaaatacgcttcctataggttttttttttcactttgagtgagaaatgtaaatagccagttgaagaacactcctagcttaaatgtatttgtaaatatttgcctaaacaaatgttcaaagcacattgctatgcaccaagaaatctaatcctatatatgaagatttctaaaaatggttctggagaaccacgtagacagaaccaacaaacagaagacagatctcgttcaagtaaaacagaacacagttataccaagtttatcttttgtacttgctgtttggcaataggatttattctggctgtattccagggagacttgaggagtcaaaatttccaaaatttctaaatgtcacattttctgtttataatggatccatatggatttttgtcacttagctataatacaataatcatttactctatctcccacggcgactcaagtggttgacaaaaagatgcatttgtgttttgtgctgtcggaagctttccctcatgactcagaaagcccgtgttaaaacaaggaaaaaaatcagtgacactgtaatatttatttagaatgtaaacaaatcatagcaggcttgagatgcaccattctggtaggatgtggcttagttgcatgagacgctgatttagtctttctgactctagtaaaacacatgcactcatgcacacacacacacacacacacacacacacacctatgaattaaagctgacataatctgtatgattaaaaatctttaacattaaattttttattagctctttgagaactttgcacaacatgttttgattcaccccttcccacaaccactcccatatccactatccttctccatccacccaatttggtcctttttttttttttaattacatcaagagcaatttatgctgttcaaatattcttggatctgtgatcttccactgaagcatggtcagaagaagttacagcttggggaaaactgactttatgtctctcagcagctaacaattaccaatagccccatgggtaggagtgggatttaatgtccactcccttttctgtggtaggatttagtctggcttggacttgcacaggttttgtgtatactgtcacaatcactgtgagttcatatgtgcagctgtcctgttgtgtgcaggagacagcttcccctttgtcatttactaccactgattcatacaccattgctgccctttctcctgcaatgatccttgagtcttggaagaagtaggtacggttatatgtttcatttaggacggaacattccctggtctcatagtctatgcatgctgaccaatgttaatcaccatattcttcaaatggaagcttctctgataaaggatgagagttgcattaatctatggtataataagtcattaagagttggcttaataaacatccattaaataaaataatagtagcgtgcccgcccccccgggcatattatcgctctaggtgtacgttcttagtctagtgatggtgccatgtatagtttcatcttatggacaggacttgaatccaatcagaaagtagttggttactcccatgacaatcatgtaccttgctgtatagtttgcatgtcttgccaggtcttgcagctcacaaggttcacaactgggtcaacctattcattacatttctctctcagtagcatgcacagacccttccagcactataaacactagtcagtagggataatgtttccaagtcatcaccctgttgatttctacatgtcctgtgactcaaatatgtgatgtcttctgtaacagagtcttacccttatattctggaggatggccaagaacactgataatagtttgtaatgcttggaggtgtattggccctattccaagcagctccaaaagatacaaccaattcttgtcattaagacttttgtttgttaatctctggtatctagaggggctctgttgccatgttatggggtagctacattttaactctttttatatatgtatatgtattcattttaggaaacttctacagtagtagatttctctatgactttttaaaaagaatgtctttagtgttctttatctcttctgtattccctcctcgacaattcctgcattcccctccccattccagtttaaccctttcaactccattttcttttgaccttttaaattaattttaaaaactgcttaatttctctgaaatacatgttttgttgatattcagttctgttgttttggctgcttattttttcatcatctcttctttcaacacagtttttttttttaacctgtgctgagagtaaaaagacaatgtagtctttctcttagtattattgactttattccaatattttattactggcagtttagacaagtctgaacttgtaattggtgatatcatgttcattcttaaaattgtggccaaatatgtggcaggagatctgtcaaataactttcatatttgtgctacaagatttggaagacttttcagagatgtatacaaagctttatgctttaagtcttgtttctactctgtactacacagattcttggtgcctggagctctggggacattggtatcttgttatctctctcattgcacctttaggagtgcttgtaaaagctattcttgtatcaggacagttagcaatagctaaagatttgtaaagagactggaaaccactgaatggatttctaccatgaagtaacaaacacctctttgtctcatcttccaattaggcaatcccaaaggacccccatggtcatcctaatgccctagaaaatgcatgctagaaacacagtgaatgtttaggctttgctttttaacttctgtagttaaaatgcagaattcccaaagcatgtggacatgtcagccttgctcaggaccatccccagtgtctggaaaaagagaccacacagggggttgcctgcgatactcctctttccctgtttacacaataagtgaacccctggagttgacaggaaaatttatagaccacagagaatctgattgtctacagaaacagaaaccagccctctggttaggcaagatttaggtcaatttttcttagagtttagtatcatttcccaggagacattttttccgagttttggtgttgtcccctttggatggctaacagttcacagtttgacacttatgtagctcagctactgaatagtaatgatcatttgcagtgggaataagtggacttcagcaagctttaaatgttcagttgctggcctgtgttttgtcttgcatagaaaacaaatacctctttcatgtgaaaaatatgaagggaaaaaggaaaatgatgggattaaaaaaaaatggttaaatagaatctgggttggagggccaggtggcatgtagatagacaactcaacactaaaggcatttgaagatgccgtctgaaaacctgctattgtagaagcttcctaaacctgcacatatacatatacaaatggaattactgcataacaggagcacaacacctctcccagataccacagatcatccaataaaaagccccgtgctacatatggatgtttcgagtagttagcaaaacataggttcccagacaatataaactgtcgacattgctctcagttaccctccatgacttgatggcagtactccattattggtccaccatacttcaatcgtagaagttaaagaaatcaggctgatactgacgtctcaatcctactggagagctttcaggcttctggagcaatgataatcacatacgaccaggagagaaaaacgatcaacaggcttctcccccgtaagccctgtgagctacagtaacaactggcttaacacaatatgcctacaggtgtcatagtggcatgaacattctgagagtaactaacgacttgctgattggattggaagcccactctatgaaatgaaattcatgcccggtacaattaactgggtccaaaaacctatggctgcctaattagcaggagagaatgtaaaacaattgttttgctaatttgaagtggtaataaactgcccctaagttcttatccttgaagtcatatatgagggcatcttttaaccttcatcagagaagcttttgggttttttttgttgttgttgttgttaacctggatgctattgcagatgctgggaagtgcttgctgacaggatcctgatatagctatctcctgagaggctctgccagagcctgacaagtacagaggcagatgcttaaagccaaccattggactgagcatgaggtctctgatggaggagttggagaagggactgaaggagctgagggggttttgcagccccatggaggggggaagcaacagtgtcaaccagccagacccccagagctcctgggaactggaccaccaaccaaagaatacacatggaaggacccatatgtggcagaggatattcttgttggacatcaatgggaggagtggcccttgggcctgagggggttcaatgccccagtgtaggggaattccagggcaggaaagcagaagtgggtgggtggggaggggagcaccctcatacagacagggggatgggggatagggggccttatgggggagaagacctgtaaaaaggataacatttgaaatgtaaataaagaaaatatccaataaaagagaaaaatgacttgagtagagcttcataatatattttattttttaaccatctacttaaaaaaagagagagaaagagaatatatatgaagagcacagctcaaaattagacatgtacaacacgcctctccctgcaaggctcagggattgtcagcttgaagggctacagaagaccgtaaaagtcacagacagttgttatctgcagtgaaacaatcattgccaagcctgacaatgccatccctgacaatgccatcccacacttgaagccatagctatgacttcacaggatgcttccatgttgggccccaccactagctgagtacctactggaggttgatagctgctgaaggtgagatttcttgacatatgtggtcctgaacaggctatgcatactctagtggatgctcctaaaaccatggccttacaggcagctctaagggaacccgatgagtttattaacaaatcacatgaaattaagaaggaaacatggggaagagagagggaaagtgttgcagatgacagatagatgatagaggagtgcgttgtagatttgagcaatataacttgcagaataatataaacagttaaaagaattataaaatgtctaccatggggcaaaatgtatcatttccaagcaataccaaggactgtgcatctaatatttttcatcatgtagtcagcttgtatcacatgacttgcttctgatgttgtgatgctttaaactgttcaaacgccattcacttagctaagatcaaggttgttctgaggttgagatgaacacttgacatgggttcaagccaatgaaatgtcttcattagccagcctgtgactgcgctgggtgttggaggcctgagtacagtcccgagactttctcacttaggcttttctagaactgtggactttgatggttggggctttgttctcattttggcaggcgttgttgctggcatgctgggttcccagggcctgactggtgcttccattatggagtcagttgtgttaaggtctgggggcctgtgacaaggtcacagcatctctctgtagcctttctccaacatgatgtaatgcatcgcatgattttgcatgattaagtcctaacaattgccaacatattgtttactataaatatattccaccacaaaagcacttggcttctttcaaggcaccaaagggtaatcgtgatattgcagtcaacactcaatgtagtgagaatattgatgtttgtaataatttagttttttcagtatagtattcactaatctgaaactttcattgcttcactgatttacgcacacacacacacacacacacacacacacacacacacgcacacacacttacttttgtgaaataataattctattcattttaatagcaggacattttgcttggaaagctgaaataagtgacgataagaacctatgaccaagattccctgtaaacaagtggtttatttaaattctcttgtactatagaaacttctagtgagaatgcagaatgactttggtaacataattcttgtgaaggaaatctgcaaagtaggatatagagagactaattttgttactgattgcagcccacacattgcaacaccaagtttgttcctgttctgggtaaagaagacctgggtatgtctgatggaacagttcctaaaaggcaacaattgattcagaatgtgagccagagaaactctagaagcctgaccttccgatcagtgtgactgcagatcaataatacattacctagaccagcacagtgccaaaaagccccttgtgctggctgccaacacacattttacttcaaataagccaccggagaatggtcaatatagaaaagtttgttccatgggcagtttggatagcatgtaacatccaacgctattgtagatatagcagggcctgctccatacaacatatagtatataacttggctctgactgatattatataatcagacttatacatacacacatatgtatacatatacatacatatatacatatacatatatatacacacacacatatacaagtatatacatatacatatatatatatacttggcctgttagtttcctgcaaaggtatcacagagggattaacctttgctatccaattaagccaaggttggcttactagagtctacctcatggattactgcatccctgagagcacttagtcacttaccatccaaagatggtaggaattggcaatattggtcatacctgctctatggctttaggtattatcagtgactcataatggtttaagaataaatcaaaattgaacagtcatatacaagaaaaacattggtctaattggtaaaaccaccatacttttttgaagtaatttcctataaagtctgtggctatttttggtagcatctaaacatggtttctttttatgatattactggataaaatacaaagatctaattataaatgcatgcttgcttgtactgtgctacaaataggactaatttaagcatggcccttagttccatcagtccattattctctgtgatattttccttactaatctttcagatactccactgaagtgacactaatatattataagccacacatatttaaaccatctggtaaaatctgattcatgtagactgtctgcattaactctacaaatacaactaatatacatatcccattgctctctcacagtatcactagtcagtggaaacatcaagacagagttagcatagatacacacacacacacacacacacctcacacacacacactctctctctctctctctctctctctctctctctctcacactcacactctctctctctgtgtgtgtgtgtatgtgtgtgtgtgtccctgtcctctgggctactgtgatcaggataatgtctgcctggactttctctgattcacctcagtataagaagacagtctggcactaatggggctccttttccctgtcctgtagcccagaagctctgcagattgtaggctgccctacctatcataggctccagtgctgtttgttttcttcagtcaccgtgatgttctttaacatctgaaaattctcatacatttttatagttttgcatgaatatgtctctcttacctcttcttagaagagaatagaaatgtccccatcagcaagacttaattttattatgatcatcatttgagaagaacattgcacagattaattattttctacaatttatatcacagactcatgttttggttttacttaagcagcagtttagcttattagagacattttgttggactacgatgacaaatcatgaaatgttagggaagctctcattagcaaaatacggcttggggctggagagatggctcagtggttaagaacattgtcagctcttccaaaggaccgaggttcaattctaagcatccacatgatagatgagaactatcagtaactccagttccagaggatctgacaccatcacacaaacatacatgcatgtaaaacacaaaattaaaataaaattaattttaaaatgtcttataagacctccttaaactatacaatgactctcaacattttgtaatgtatatattttagatttttttattcttgtatatattaaattatgtatggaaaggtttattaagcatgtaagcatagtgctaagaaaataacttttaaaatcatgaaagtagcagacatttctgagtaaaatgtgtgtgtgtgtgtgtgtgtgcgcgcgcgcgtgtgcgtgcgcgcgcgcatgcgcaaacattttattcctgtctacaaagagaacttctgtcaaatgttatatggttctttcctaagaatatgaatatatattgcttagttacttacttttcctagtattaattttcagaagccaaattattaggataaaataatgtgatttagtgatatatgtatgtgtgcaatgatctatatctaaatctatatctatataatttgttcaacattttcaaaaaataacatagtaacatttcttttctaaacctactccaacttttgcgattatgttaattatattactacctaaatctttggttatgttgtttaataaatgaataaatgtcaaatattatatcttgaattatttctattttaatgacttatcgttgtagggagatggcaattctctgactctaggccttgtctactttcaattaacttggttatctcttgctcaattcattgcttataaaggtttgtttttaaatttttctgtatgtgtgtctatatgagtgtgcatgagtgtggctactcacagaagccagaaggggagagtatattctctggctctggacttagaggcagttgcaagctacttgattgagtgttggaaacaacactcaggtcctttggcagagcagcaagagttctgaaatactgcgccatctcttcctcattccattaattgtgacagctcatcttaaaaattatgtttttcctagaatattttgtcctaattcttaatatcctgttgaattctttttattaaaataaggtttgttttcagaaaaacaggaaggaagttgatgcccctattgtgtcaagccctagtgtcagaaatatattgagcctctactggtctaatggttgctggaagaaggaagggatgcaggtaggggcttctgaaggacacagagtcagaagctggagtgtgatggatacatccatcatcctgctattgataattttctcactggtacacatctgtcaaaacctgtcatgtcgcattccttaaaatatgtaatttatctcaattatgtttcaataatattattatttttttccaaaagtgacaccaagtatgtaataaacagctttcagctaaaagtaaaaactgagtttgatgagattttttttttctatcttggatagatttctcctgtcacagttacaatagctttctaaaataaattgagaagctgaagaaagtcactctaaccttttggattataaacagatccagcaaagcacctagtcctgaatcggactccccttcaaagcccccaaagaaatatgactgctccatggtattagtgaggacagctgcgtatcaatctctgatattgaagaaccatggaatctgtacaagagcagaaggaagaaggaagcatcaaaccattgcatctctccattacatcgttaaataaagatgaggactttaagatacaatttagggatgggtactgaagagatttcatactcaacaataattcattttaatgcagggggtgtttctaatgattcccaaaggcagtatgtttctaatgattcccaaaggcagtataaactagagtctctctctctctctctctctctcacacacacacacacacacacacacacacacacacacacacccttaccttaagcagcattaatagaggtgaagaggtgaaggtgactggagaatgcagtagacggatgtctttattggcagaattgccaagggatagggcacaggctgtgagtcagacagactcaagcagggccccagcagggatcatgctgttcccaccatagggactgcctcccaggcctgtggtgtgctcagcttccacagcagaaaggcacttctacaattttcacacaatggttggttaattaattgattgatttcatgcagatgaacaactctggccttagagtctaaaggtcaaaattaaaaccccagaaaatcatttcgtgtttcagaacattagtttcctttgatatttgcaaattgttgacaaaacatatacattctgaaattgtggcaaaaaatcaaatatctcatgcctgtagaaatcttggtcaaactataacagctcttgagatatggccaagtgatagaatgtttgtctaggatatgcaaagctgagataatcatgaactataagcataaatggtgtagtagacactagaaacactaggcattgttctgatggtggtggctctccaggggattcatcagttggttatcagttctcagtgatgtgtttgttccaaatgtatgggacaggttttggctcacggtcctgaacccctccactacttcaatattgactatagtaagtctgaaagattttctataactttgagaagttaatgatttgaaaggatacaaacagaactcaacaaagctttcacatcaaatagagtggctttgaataataactaaagaagcgtgtgtatgacagagagagagaaagagagagagagagagagagagagagagagagagagagagagatagcccccccagcatatttaatacagaagacaaagaagaagataatgaaggtaataaaaacaacacagtgacatgtgctaagcaagcaggagttatgagataaaggtagacttttattttttgtttgtttttcaatgtgaaattgggcctgcccatgtcctaagattctgcgtagccctgccagtgtcctgcctgctgaccgtttaccaggatgcctgggaggcccctggcattcagcatactcagtctgaaattcattatctactccctgggtgttttatcagaagcctggagtcagctttgacacctcttcccctcaaatctcctctgccccatatagagctgcctcaggtctggtgtcatactgttctgtccccaaatctccacttctgttgtaactgcctgagttcaagggatgggatttccagtgtctggtgtttgtcctccccacaaacagcccaccctacaaactgccgctgacaacaatcttgcttacaagctgctaattagctttcctgagctcaagactttttcttctgcttggaatttaactttgcaggatattcatgtaaatcaaccagcgtttatgctttaaaagctgatcaccgcggagttctttaaaatagaggggaaaaaatatgaatcctacctatcccaaaagagggcattagttataccaatagactttaacatcgttgaaatggcaactaaattctgtgtttagtgtgtttagtgcttttaagtgatatttaaaactggaaatagtagctcacacctgtgtcccgaccactccagaggctgagacagtagtagggtcaccagaagataaagcccaacctgagccactcagcaagattcaggctcgcacaggtagcagagtgcaaccttgcctataagtgaatgcatacatagaaaaatgccctgttgatctatatttaataatttgagaagtcactgataatgttaaagtttttcttttcgaactcggtgattctcctgcttcagcccccagagtgccaggatttcagacatgagctataatgcctgatttgttagcattatttttttaaagtgaaattattgaacagtatgaatagtcagatctttaaggaatatattaggctatcaaaatatttctagttgatgggatttagcaggattctttcttctagtctgatatgccctggaacaaaagccatggacttacgtggaactactgaactggtctttggaaatcatagcgcctctgggggagaattccagtgagccgccataactccatcccttagtaccatatggaatttggaaatccatattagaaatctaccagtgtttgaaagaataggcacaagggcttttgggaagcccatatttgcctgttttcttcttcaaactgtgtgtgtgtgtgtgtgtgtgtgtgtgtgtgtgtgtgtgtcctcagcctgctgtggtgggctccatttgttcacactgtgcctttctcttgcatttcctaaaaaagaaaaagaaaaagaaaaaaaatcaatcagtatacaagtctgttttttaacaccatgaataacgatactgtaggaactggggcaaaacggggaataccaatgccctgcggctcacaggtttatttctacatctgtctcccagttaacgctgttgctaggagttatttccagacatgtgtgtttgttcattcactgacctttaaattctgtcctttgaaatatgcattttaaatttatctgtatggtcttttctcttgcctatatgtacatatattcatggacaccagtgcctgcctggtgcctatagaggccagaaaagggtgccatattccgtcgaactgcagttacagatggttgtgagcctccacgtaggcactgaaaactgaatctaagtcctctgcaagagcagtaattgctcttaactgctgaagcatctctatagccctgaattctttctttctctcttcccattttttttctgttcttgttttttattttttaaagatggaagccacatagagatttcctcaatatcctgccaatctttgtttgttttctcacattttcacagcttgagagagcaaggcccagagtatgtgtatacatctgcaagagtacccacccactactacctgatactcactttgtaatttacatacatttgatgctggtggcactagagaacattgattgttatcacagaaattgtcctaacttggagtgctagcagttctttgtttttcattttacgataacaactcaaattaaacattgctagaaaaaatgcctaatccctccccaaattacttcctttactgtttgtttgtttgttttatttttgttccttcttcatcctctgtagatacccatctcgtttctactaagacataagcaactggcatgagaagaggcaggaagacaggtcacatgaccatttttattggtttagatgacactacagaggggactgggaggggcttgctggacaaagtgctcactgtgaggacatgagttcaaatgcccaggacccaagcaaaatattcttggtgatgtgtctgtaatatctattctgagggagtggagggtggagacagggggattactgggatttgctgactagctagtcttgcaaaactggtgacttttctgggttagttagagatcctgttccttactgcccccaccaaatagtagatggcttacaatatatgtgacttcagatccatagcatccaacaccctcttttgacctttgtatgcacccacatatgtgtgtacatacacccccaaacacacaaatgaatggctacaaaataaaaatacatcttagaaaaataaggcagataacaatagagagagaaaaacacctgatattcatttcaggcctccttgcataccaacaaacacataggcttatatgtctgcacatacatgagcacatagatctatatcatacaatacatatataacatatatatgctaaataattagtactgatacatttgttattactgtggtgacttgccttaccaaaaacatagattcttgggattcatggtacaataacaaatcaagttgctctaccccaaataatatttatggcctccactataaactgatttttttctattaatttttatgccttttaatttaaagaacaattttgtattacaacatgtatacaatagacacacttttatgttcttttgagtttaaaacgtaatctttatctctacaaactaaagcaaagtttcttgacagtaaaagaaagccagctgctccccacaatccccagtgaccccagtgacaggagggtaaaggttaagatcagaggttctgacatggaccagctgggttgaaatccaccctctggtccttgcttcttggatcacctaggtaactcagatgtgtatgcagtgggctcctcttctgcaaactgctaacagccacaccgcatggttgatgacattactatgagacaatcctacgcggtgcagctaaactgattgggagtgtgctacaagcaaagcaaaactcaaactcaccagcttctttaaaataaccttccattattctaggtgctagtccaatcagaagacatgtttggtttgggggtttgagattatagcccacaaaacatccttacatgtagaaaacagataggtatgtagaaacatatataaacatataaacagataggcatgtagaaaacagataggtagccccttaatttttttttttcaaatgcaaggttgtatgaaagcaacttgttactcatcagcacctggaatttgaagtttgagatctgatggttgcccactgatgtctctgtgttttctgtggctacaagatgctttctccctaggcagcagcgtgagtcacagagatgcccagttggcagtacaatcagagaaacaagtagtgggtgcactgcagtgtgctcagctgtgatgttctgtgggccaacggaattaactgcagttttccttgatgatattttaccttctgatggttttgcttgggatcggcccccatcacaagtcaaagaacacccagtatgctgcctagcacacgggcagacatgttcagcgtcagcagctgttgggcttctgtgtgtgcgtgcctggcattggatgctcttcctgtcataaaaaagttgtgaccttgccactcacccgacagatggcattgcctgattaaagtcaggccatatttagaacatttctgtaaaggctttgtcgtccagagaatcattactgcctactggtgtggtttctcttcaacaattaaagaagaaaaattgttgggcatcttctcagaaggacttttctattcccctggttttaggacaattggtcttgtactttcataaggaaacttgtcacacttggggggaaaagaaaaagaccacaatgtacatactagtttattagccaagaagagttcatcttaattacaaactactttgaacaagtaggtgtctgctgacaaagatgctgtgaatgtcagcctgctcctgtgaaagaaacagaaggcactggcagaaccttgagtgactggtacttcaaacttttcatagcactttgaactcatctaaaatagaaatggtctgattaccatatacctatgtgtgtgtggctgtgtgtacatgtgtgtgtgtgagtgagtgtgtgtgtgtgtgtgtgttcacaccttcatattctgaaatgtattcatcctgcttaccttccagttgctgacataaaatactggctagccaaagcaacttagcaagagccaaggtttgtttctccttacatttccagttcagtccatcactgagggagatcagggtgagagctcaaggcagaaatctcaactcaggactgtgggctattccacacctccaaccagggatatcactcccagccattgaattacagcaggaaaactggaagatagtgccggagagctgtctcattctcagtgaagctaatgtttagctaggtttcttatgcagtcttgaactaatggcctagggggggtggtgctagccgccattgcctaggctgccccacctcaacttattaatcaaatagcaatcaaaacaattgccattagacatttctggaggtcagtctgatctatacagcttctctgtgcaggctttcagatgatcaggcctcaaagagttggcaattaaaactaactagaacaatcatatttacaaatgaatgaaatagaacactggactaattttgaacaaaatgtcaaaggcatttctgctaaatcttatacttttaactgaggcatcatggtctagctatacatatatagcttaatttatttacatgtatacttaattacttccttgtcgttgaatcacagatggttgggtgtaggaaagggtgaattaaagcagtcaaaaggagcagagtgtagaggacagtcacggttaggacttaagcagaccgacttctgtctgcactcttccacttaagagtgacagtatccggcaaatagttcattatttcaaactcagctttcttttttccttcttttactccttcctccctccttccctccctccctctccccctccttcccttccttcttaaattcagtttttagtttttctttattgaaaatagatctttttctcataaactatatcctgaatgtaacttctcttcctcccagttcctccttctctgccctcctttccgctcccctcccctcctctgtggatactctttctatgtctcattagaaaagagcaggctcctaagagagatcaaccaacatgagaaaatacaatataataagatgaaacaaaaatgaagttgaacacagcagcccagtaggaggagaagtcctaagagcaagcaaagtagacagagacacactcattctcatatcaggagttccataaaaatattaagctaatagtagtaatatttagatatgatttttttttggtttttcaagacaggatttctctgtgtagccctggctgtcctggaactcactctgtagaccaggctgcatatgtgtctatgacctggtgaagtaccatgtaagccctgtgctttctgcctcagtagctatgagctcatatgtgccttgcttaggtgattcagacacccttgttcatcccctctgactattataatctctctgccacctcttccatgggattccctgagctctgaggggatgaatctgatgaagactttcaatttagatcgtctctgtgttattgtctgagttatgggtctctgcatctgttcccatctgctgctaaaggaagtctctctgatgatgactagataagatgctaatctataactatattaaaatatcattaaggcttattttattgacttttttttaggccagttgcatctggttttaccacagggctctgagctatatctagtctctggttcttagttacccatacagtgtcagctattggtttcttcacatggagtaggccttaagtcaaagcagacactggttggctacttccaccttgccctcagtatattttgcagccaggacagattgtaggtcaaaaatttttgtgtccacatttctcttccagtaacctacagagaaccttccccataccaaagagaccaaaacataggcatgaaagctctgtggaggcattggctagacttctctgtgttcaataagttctgtagatcttgcccttggcaagagggctctgctgtcagtttgtggagaacaaccctttgtcttttcatcatcaactcagattgtttggggatttccatgggacctccttggccaacaatcctattgaatacaatttagtctagcctctggaaaccttgttttactaaatgagatggcatttggtcctccgtatcccccattactaggagtcctctttaggatcatcttcatagattctaggaagtttccacttcacaaggcttctacacccctcccaaggcctcctaattcctgctgtctgcttgcactctttttccaacccattttatctgccacctaatcccttctgctcccatcctcacatgtactagtccacccataaaatctactctagcatcccttcccaggaagatccatcttccatagacacctcctctttacctaacctctctgggtttatggttatatccacttataagtgaatccataccatctttgtctttctgtgtcttggttactcaagctaattttttttctagttccaactatttgcctgcaaatttcatagtgtcatgttttagaaacagtatccattgttttattcaagtacatctaggatgtttcaagtttctggctcttatgaataaagccccaatgaatattgttgaacaagtgtccttgtggtatgatggagcgtcctttgggtacatgcccaagaaatgtgtagctgagtcttgaggtagatctattccctattttctcaggaactgcctattgatttccatagtgtgtatacaagtttgtactcccacccacaaaggaagaatgttcccctcgctccacatccttaccagcatgagctgatacttgtgttattgatcttagccattctggcaggtgtaagatggaatctcatcgtttgaattttcatttccctaatggctaaggatgctgaacatttcttctgtttctcagccatttgaaatttctctattgagaattctgcttatatctgtacctcattttgtaattggattgtaatttttgatatctagttccttgagttcttcatatggatattagtcctgtatcagatatagagttggagaaaatatttttccatttttttaggctgctgctttgactgattgacattgtcctttgccttacagaagcttttcagtttcatgaagtcccatttattaattgtttatcttagtgcctacactatcggtactctgttcagaaaattctctcctgggccaatgcattcaagcatattccctactttctcttctatcaggttcagtaattctggtttacattgaggatttttataagctttaatttgggtttgtacaaggtgataaatatggttctatttgcattcttctatatccagtttgatcagcaccatttattgaagatgctgcccagtgtgtatttctggcttctttatcagatatcaggtgtccatatgtgtgtggatttaagtctgggtcttcagtttgattccattacttaatgatattttgatttttttcatttcgcatttgtatccccttgatctccatgagttgtcttattgcttcagctaaaatttcaagtactttattgaatagctatgaaaagaatagacagccttgtcttgttactgattttagtggaactgctttgagttcctcaccatctaatttgatgctggctataggctttctgtacattgtctttactatgtttatgtatgtcccttgtatttctgatctcttcaagacttttatcatgaaggggtgttggattttgacaaaagtcttttctacacctgatgagatcaccatgtgatttttctttcagtttgtttatatgttggattacatttactggtttctatatattgaaccgtccctgcatctctggaataaagccttcatgatggatgattttaggtgctctgggattcagtttgctattttatgagtatttttgcatggtgttaataaggaaaattggtctgtaattctctttctttgatgagtctttatgtggtttgggatcagggtggctgtggcctcataaaattaattgggcagtgttccttctgtttctttttcctggaataacttgaagagtgttggctttaacccttccttgaaagtctagtagaattctgcactaaaactgcctgtccatagttctgtttttggttgggagactttaatgactgcttctatttctctagggattatgggtctatttggattgtttatctgatgttgattttaactttggtaactggtaacccattgaacaaaattatcaatttcttttaaatttttttgatttggtggaatacaagtttttaaagtatgttggtaaaattctctagatttactttgtgtctatagttgtatccccctttttgtttctgttttttgttgttgttgttgttgtttgttaatttgaatgttctctttgtgtcttttatttagttatgataagggtttgtttctccttttggatttctcaataaccaatttgctgtttcattgattctttgtattattctttgtttctcttttatatttcagtcttgagtttggttatttcttgctgtctactcttcttctgtgtgactacttctttttgttctagagcttgcagatgtgctgttaagaaactagcatgagatttctcttaaaaattttatgtaggtatttagtgctataaatttttctcttagcactgctttcattttttctataagtttggaaatgctatatattcattctcattgatttatagaaatctgtgatttttttcttgatctatttttcatttgatagaggattgatcagttttcatgagtttataagctttctgttgtttgtcatgggtgaccttcagctttaatctgtgatgggctgataggatacaaggatttatttcaattctcttgtatgggtagagacttgctttgtgtctcagtttgtggtcagtttttgagacaatttcatgaggtacagagaagaaaacgtattgttttggttatggctgaaatgttctctaaatttggtttataagaattgttagatacagtatttttctggccattggtgaaagtggggtattaaagtcccccactattaatgtggaatattctttgtatgatttaagctttagtaatgttcctttcacatacttgggcgcccttgtgtttggggcataagaattaaaatgtcttggtatatttttctttgatgagaatcttaccccagcttttttgattaattttggcttatagtgtattttgtagattattgttttatttctagttgcttgaaatatcttttttcaaccctttactctaaacagtgtctatccttgatatcgaggtatgtttcttcagtgcagcaaaaaaaatggattctgttttcatatccattatgttagtctgttctttttattgaagaattaagaccattaatattgagagttattgagagatatcatgcatgcagttaacctttttttggttgaagttttacctttagcaccgtctttagactgatagatattgttgaaatttgactttatcatgagacattttatttttttgcatctatggtgactgaatttttttctgggtatactagtctgggtaagtattagtgggatcttgagtctgcagcacatctgcccaggcccttctggcttttacagtctccattgaaaatcaggttttaataatctttcttcttcttcttcttttttttttttgtatgtttagtgttttgaatattatttagcaagaagatttcattttctgatccaatctattagatgttgtgtatgcttcttgtacctttataggaacctctttttttatgttaggaagttatgtatttattgaagacttttttggggtctttgagcttggtttcttctcctttctttataactattattctcagtatctctattactactattctctattatcctcatagcatgccatatttcctggatgtttttgtgtcactttttttttattcagtgttttctttaatgaatgtattcacttcttcaatgttatcttcaatgcctgagatcctctcttccatgacttgtattgtgttggtgtatcttgcctctgtagttcctgtacaagttcctaaatttttcatttccagaatttcctcggttttctttactgattcttatttccattttcatgtcttgaacagttttatctgtttccttaagacatatttatttattacttggtgtggggcgtgttcctgggtttcttgaagagatttgttaatttccactttaagggcatctactatctccatatatttgattttaaggtgtttgtgggtgctgtggtaggatagctgagctctagtggagacatattgccccaggtgttatagattgtgtgtttatggctagcatctaggtttctgggtttggaattattatatgtctaggtgatgatttctagaactgtctttgtaaggtagatattttgttccttgatttctgtttcttctctggattttgtagcctgtgctggctggttttttgcctgtttttctggcctgcttagctgggtttttcacatgaaatgtctattggtgtgggaggctgtgatactggaatgagttgagggaaggaaggttggagatctttgtgattggttgaggattgggtcacagaggaaagggaggccacagaaggttttctgctacagagctggtagtaacactggcagaattggatgtcaggagcaataagagagaggtctgcctttagcctacttgttgtcctgggaagaactgcctttgggttagcatgaggttcctgctagaattgaggtctgagacaaagcaactgctagggggtctgtacaagagtatctgcgccaactctggtgagtgatgaagggatttctcctgtgtttttatttcatcttcccctacagatcttccaacctccctaccctcccaaatcaggacacaaatggtaagagagtaagcctcaccctattctaatattctaattaaataaatctatataagcctgattcccaaataagttcacattctgggtttctaaaaaatgtagacttcaatataaaaatgttcacaggatgatacaatttactttataacttgactcaaatgccatgtttttgtagacaaattttgcttaactacttatattgaagaaaaccctgccccttcctacaatcctttaccctacataatatgtctaagttcacaaaagaaaactacaactttatttatttcttccttgtctatctttccactactctgaaagctctagcatatgtacctgctgtagactttccgtcttagatattgcagtgcctggaataaagttggtcctccataactatttgtgtgaaacaaaagactggtaatactgcctgactcgagattaggaatcagtaaatggtgtgggtgctatagttacttttaaagtcttgttcttcatctaaaattggtagccactagcctcataccaaagaaattgaattcagtttccacaaatgtaaatttgaataacatatagtggctcgagcactgggcagatacactgtagaacacttttactctgaaagaaaatcatattagtacctgctggacatgaggaagaaccctagcagctgagatgaggatgtcagaaaaagttcacttctaacctaacctcccttgacctaattccacagccctgccctacattctcctctcagatacaaccaaacaggccctactttcttttgccttcatgatcctagaaagcaactgaaaacagacctatctacagttattaaattaaaaatacagattaaaatttttaaatgttacaaaggggctgtctttaaaatgtgattagcattattacggtagatactcaacagctattttttactttaactcttctctttgctatttaggtaaataaatgggaggtctatttcttcatctgaaggttctgtttcacacaaattaaaatgggctccatgtgttgatctgaatgagaatggccccacaggttcaaatatttgaatgcatcagggagtgatactgcctgagagatattaggagtgaggtcctgtgggagtaggtatggccctgttggaggcactgggagtgggctttaaggtttcaaagctcaagccaagcctagtgtctctctctgcctgctgcatgtggatccagatgctcctgtctgcatgctgccatgcttcctgccatgaagacaatgagctaaacctctgaactctaagccagccccaactaaatgcttttcttataagagttgctgtggtcatggtgtctcttcatagcaatagaacattgactaagacataccataggaagtaaaatgtgttagggcaggactgagtggtttcagggtaccacatggctatagatgcaggtgaggctagcaagcaggcaacaagtatgtgtgttccagcagcagctccatcatttcaggaagtacctgaattttcatcattagtttcaggccctagcataggtccaccagctctgtgggaaccttgcattcagaaagtaacctaatgcttctagatgtctcttctggttagtggtaaaatccatgactatgaataaaaagccatatggcttcatataaaaaaacaaacaactggtgctttagaaaacagaataccatcaaagtatattaccagatcctgaaccatatttctaatgatgggctcattaatatcatctgctaagtaaagggcatacgaggatgtaattgactcacaatgaaattaggaagtagtagaaagcttattgcttacataaattccaaggattagcttagaacaaaatataaaatacctgtggcagtagtgactgtttattttgattgacacattgactggattcaggaatccttaggaccttattgaggcaaatctttgggtgtgtctttgaggatgctcccagagaggaccaactgaattagaaaagagtacccagcactctcccatgggtggggtctatgactcaataaaagaaaaacaaagagaattcatctctctctgcttcctgatttgcccagatgaaagaaactttgtattatagccatcaggagccactccacaccatacccacactggtgttagactagatcctcaaaccaggatccaaacaaacccttagccctttgcttatttacgtgtgtttggtcacagcaacaaggaatgtaactcataactcacacagtagtaaactcaggatatgtctgtattgaaagaaaactagcaaagacccagagcccattgcagaggtattaccatcaccttagtctttgttgaacagctacacagtgtcattatcacaggctcagtgacttttgtaataagaatagatggttccaggatatttattcctagacttcaaatctcatcaccattccctttagccagagagattgactataactgcttaccttaaatgagtctagatcatttgctctagactactgacaatggagagcgagtgtctctgttgttccataaatgagtccttactgcctgatttgggttgcagagaagattggtccctgggggatgagtaagagaagagtggaagattaattgtatacaaaatacaagacttcctgctgggtctactgagccactgttcaaaggaaagaaaaggatggcaaggcaaagaaagagaatatttaccaggaatagttctcaagatagagactaaatattttatgagcgtttgagacacaggaagcaggaaaagcataaacattctagggtcttgagatgcctctgtttgtcaatctgtcttcgtatcttagctcactgctcattaaagttattaccttaatgcatttaatcaaaatattgactctattctcacactgcaaataacttgtgacatgacttggagcttaattttttttttaaccagtagaaggataagaaaataattcttatctttgcatcattaaagtggtagtgctttgtgtggtgtcctttttagcttacaggtttttattttattttctttttaggggaaaaaaactttatttctatgttcttatctggggggagcaacccatgatcttggcttaaccaatcctataccattgactccccattgactcccaaattaaattgagccatttatgtattctataatgccatggatgctaaacaaagagctgatgatgacatgtattgttagcaaggctgtttaaggtttagcttcactggcatataattgacacatatgaattgtgtgcatccaacaggtacaatttgatgtttgatgtgtgtttaggtgtgtctgagtgtgtgtgtatgtgtgtaaaataatcaccatggctatagacctctatttatttaaactacctgactctgtcatcaactttggttgaaatgtttgacatataggaagttcatttcattgagtttttcagagttcacctgttacttaataagatcaaaaaaaaaaaaagaaaaaaaaaaacaacaacaaaaagtcccttcataactttaatggctaagagatcctacatgatcagcagccattagtatgggatccagtggggattctatgaataatattgccatctactgactttttaaaacagactgttctctaaaatattagcatcttgtgtttacaattatcaagtgacctaatcattattggtatttatcttagtcagggtttctattcctgcacaaacatcatgaccaagaggcaagttggggtttattcagcttacacttccacactgctgttcatcactaaaggaagtcgggactggaactcaagcagggcaggaagcaggagctgatgcaaaggccatggagggatgtttcttactgttgtgattcccctgacttgctcagcttgctctcttatacaacccaagacaccagcccagggcccttcccccttgatcactaactgagaaaatgccccacagctggatctcatggaggcacttccccatctgagcttctttctctgtgataactctagcctgtgccaagttgacacacaaaaccaacctgtatagtttttttttttaaagtcaaacgtttgttacaatttatggttattgttacttataagtcttaacctttaaatatgcaataattatttatcctgatttctcctatttgacattctttccattgcataaatttattgaccagaggaaaattgacaaattggtgtccaaaggtatgtaatactcctttgtgtatgtatgttgcatatgtgtgtttgcttatgcatgtgtatatgtgtatgtttgtgtgcgtgtgtgcatgcattcattcatatatgcgtgtaggtatgcacatgccattctttgtgcatagagtttaaaggacagtgcctggcattagccttcaccttccaaaatctttaagccggggtctaccttttggtcatttactactgtatacagcatgctggctggcaagcctctaggaattcccctagttctgcctggagccacagatatacatgacactgtccttggtttatgtgagttttacacatttgctcaagccctttatctactgagtcatctccccagctttgtgttctagttctctctctctctctctctctctctctctctctctctctctctctctctctctctctctctctctctctgtccctccctccctctctctctccctccctccctcttctctctcctttcctctatctcttccactcccctctttctttaatctgaacaaatgaaggctactgcattaaactgggcaaaagcctttggatgatgagtttatattgctgaattttacaagtgctacaaatttagaaacctcaagccttcttttttccttccctttaatcttacagctccttaggcagagacctcaaagtggcagggcttgggtaactgcttacttaatcataatcctgaaagcactggccaaataaactctggagctcaagactctatgctaagatcatttctgccactcgaggacttgcttggttttgcagttatgtgatggtatttcccatttccttcttagctgttgcctgtatccccctttcttcttaaaggccagtgtgaagaccctcacgccattgctcactccatctcagcaatgcagaatgtcttctcccatcatcctcatggctcaacctccctcctctgtatccaaccacacagactgtttgcaagcttagacccacctcaagtagcgccccatctttgatgtgatgaattaatcacaaaaccccttctttccatgtcacaatccagtcactaactgtcattcagggtgaagacagaagacatcttagtgttttgtactagctgcagaattcttcattttttttatcattaacttattctttgacaactttatacatatttataacatattctagtcatactcattcctctcccccttcctcccatccacactgtttcctcctctcagagggtcccatgtcacttttgtctttttgttttaatcttgtggctcattgagtgtaaccaaagccattcctgtcgagacagtgtatagctaaccactggctcaacccttcctctctcccagtagccatttgggaagaacctagctccttcagccccttccccatatatgaccaaatgtttacaggttcaggcctatgtacatcctgtgcaatactcacagctgctgttgctcagagacatcattgcacacaccagctcccaggctcttccatcatttcttctcttcctccttattcttccatccctgcctttccctgccaaatctcaagaagtcatgctgttaatacccaggcctccgaacagttcagtgtcccctgagagagcacttataatgattaaagtcattagcctgaaattgatcatcaacccaattcacagtcaacgggagatccatgcatcctgagccaggaaccatgaacctaagacggtcatttgaaccatggccaatgcaccactgctccaatcttgaggctgggacagtttaactaaggatttgactaagtccctgtgatcaccacatcgcctcagtctttctgtccaattattgagtttgtatctttatgattactctcagagataaaacaccttttggccttataccttacatattttatttgaatggagtgttgtggcatgcttgttaaactttttatagggaaaataaaatattaccttattaaataagcacactaattatatacctaattgtaagttcagaaattttttttcaaagaatgctttaaaattgtcaaaagacagaacattcattctcatattgtaatttagcttagtttcttctgctccaacttttctatgaggccctgatccccctgtgacttgtgcactcttttgcccagtacgaaagaacacagcctcacacatgggcctctcttccccctcctgggcagctcctaccattgctgctagcaacaaccttaatcacagtgacaatttcttcagggtcacctcctctccacttcggtgagacaaaggcttgatcatgtgcttcacagcttgggcagttctgtagtcctgtctcccaagagtgaagcttaaaatgttgacatttcatatctctctctctctctctctctctctctctctctctctctctctctctctcacacacacacacacacacacacacacacacacacttttttttttttactaaattcattatttgcttaccagttatactgtctaaagcagctcaattttatatgcgctgttttgagaataaacaaacccaagaaactacaatttctaaacttttaaaaccttagcacccattgctgtcttttaagcctatttggagaaaggggtggacaaagttcagagaataatgctgtgtgcctttgtagatttgtgtctccacatactattattcaacaacatatcacaatttcctcattttaagttgacagctttgtcacattgtatgctaacacaaaataataatggcaagaatgctaaaactagtaagcacttctgggtatttataatggtatttgccaggctgagcacatggaaaatgatcttttcaattatttttatcttcactagttttgtaagcattgtgatatgttgtccctatttcttctttctctctcttcctctccttccctctcccttcctctctttccctctcccttcctctcctcccacccctctgtctgtgtgcacatatattccatagtaattgtacaacagatgtaccttagaaagaattgtctacacatcttccatctacaatcattgcttattttctttccttttcctatacttcagagaattaagtttctctttctgaaatcaaatgattctgtttccttccttccttccttccttccttccttccttccttccttccttccttccttccttctcccccctccctcccttccttctttccttccttccttccttccttccttccttccttccttccttccttccttcctgtttgtttgagggtttctctgtgtagccttggccatcctggaactcccttggcagactaagctggccttgaacttgtactaatcagcctgcttctgcccccaagtgctaggataaaaggtgtgggccgctactgctcagctttcctttacctttctatccaacttttcttttgcccttttcttaatcccattcctggcatttctttctgcctcggatatttttagggtattcctttcttcattaatgaacctgctctgtaatattggccacaatggttctttcttttctctgcaaaagagttcatttaagaaaaaaagaaagaaagaaagaaagaaagaaagaaagaaagaaagaaagaaagaaagaaagaaagaaaaggattttctttacccaaaggtgtgattcccgcagtctcttcacttttccccacagctatttaaactttctgaaggaatgagactactgtgactcagtgaggttccagaagtgaaggatgaaggcatcaaggtcctgtgacacaaatctaataacatgcacctttccttattttttgcatctattatgcaacaaacaagtatccaatctgaatgacagctagaattttatggcctcttttctctgaaacaaccatcaaaagcagttcagcccacagccagttttatggtctcattgtcaggatttgctaactctgtaatcacatgcagatttcttcatttttcctggcagttcatcgtaaatcaaatgataaatctcttagcatcctgttgtctggtttctgtctctatcagttcctttggttatattagaattcataaagtaaaaggcgtacctctgacaggatttattattctttacttgtcttatcacctaaatatatagtgagcaaccatcccgatttcttattcttaataagaaaattttgaagtgtgaactgttacaagtttaggtcatgattcctctgctctgaagtcccttcgtttgcttatatttacctgttaaccacaaaaggcttcatttgctgttgtcctttgcttgcttagcttgccttctatggttatatgtcctgacttagcaatgtatgttcttattctttgttgattgatcagtcagtgatgaaaatagtagtataatttgaacacttgaggaccaagaactcttgataaattaagagctagggttaataggacaacattgtggctccttttgtttgagaacaagaaattctatgacttttgactttgaaaaccctgaactggattactgaagaaaagagaataaagagaaagcagctccttagaattaaccaataagaaactactaggaattgccagggtggtggtgaactcttagtcattattttacagctttcttaagatgaagcatcatggatgtgcatgcctggtttgcttcctgatcttaaaagctttcaactggtgaaatcctatgaaaatttataatccagatatgctgctgtaaccatggtgactagttgaacacactggatccccaccctgtggattccatatgcagccactcactataggcaatgtgaaggaaattttttatttaattttgagcattcatatgtgaaacaagtactaatgctaaatcatcacttcttgaagggatttcacggagtcctctgaattctgtattgggtggtgactgaatactatcaagggcagaactatgtaaacccaaacccgaggcatcaatttgaaattagaggatctgttttgcagacttgagcaatgtgggtgactgggattgcacagttagagtggggatgtgtttgaaccccaaatcttgggcaccaagtaaagaaatgaaggtgtatgagttctccctagcgtcacataaaagagaagattgtagaacatggcagcccacgcctaaaatctcagcactcaggagggcgaggcaggaggatcccgaaactgaagccagtctgggaaacagaacagagtcttgtcccaggaacgaacaaacatgaatagaaaacaaagcaaccttagcagtgctaccctggcttcatttactgttaataagaaaaggcttgctacatctccttgctggatagttggttaaccctttgcctcctttaatgttttttgtttgtttgtttgtttgtttgttttttgtttgttttctttttaaatggccacaagccttaaaaaccaaaagtgtccctctaattccccatcttgtgtggttctagaacctggctaaacaaaacaggcaccaaccgagctgtgtggagttgtcctcaactattaataggatccgtgctaaggttgtttccagagaggtcctcatttctcttggcctgtgtgcgcacggagagattacatagctcacagctgctcctattgcgcatggcagatgagaacctgtctcacttccgcttccttttcttcatgctgttccttaaattcactccccttgacttctggtctgctttggttactcacctccatctcctaactctgaatttcctcttcagtcccaactgttccccatcagcgctgggatcataatctcaaactttctcacacactcaaggtagcgccctctccttccagcccctctcatcacccgaaggctccagctgttggatacttccgctgctctctccttggcacacccattacccttctgcactcagagaaattgcaaagcagattttattttccttgaaatctccccattttacctcaggattttcaggggaatgcaaaagtctgtttgtgatcgtcggtctcgactggagagaggctctgtgttatcagaaacttattcctcttctatcagttcgcatgtccttttctctattaaatgtccctttcaaagccagtgccttaacccttgcctttctaacatttcagctaacttacccttggcccacccctttcctttggttatctcgcctgtgtattcacattagtattggtacttacatattcataaagcaacctatttttaaaaagaaaaaaacaaaaaaagcaaacataacgcaacattttgcatcccctccttcccccttctcctggcctacagctttcctcctcttcacagtcaatgaatttttttccactctaaactttgaattttcctcctgacaagatactgacatttttaggactaaacttgtagaactccttttcatcctgattccattattctctacatttgaagagcattgcctgctctttgttcttcaaccagacaccctacctacccacctctaccctgatttaagcagaacccccacccccagcccctcacccacccctgtagagctccaggctccgctagttttgtcagttcttgatccttttgaagttcttgagctttggcatgcccctgaaagagacagccatctgggctttgttctcaggcctttctttctattcttattcggtatcccatagcgctcaagtgtggccatacatgaaagtcacccacaaagcctggaaaaaatgtagctgtcctctccctgtgctagatcctctgagtctgaatgactagggagtgaggccaggcccttctgctcttcagaaggcctgccaggagctgtgatggacagccctgagaatccatgtctcatagcttgcagtgctgtggatgaaagtgtgagcttagcatgtgctaggcaagcactttacctcttaactggttcttaatcatcgtctatgcctttgccagtgcaatggccaccaatgtttaatctccatcacctgaactccaggcttgcattatacacacacacacacacacacacacacacacacacacacacacacagagagagagagagagagagagagagagagagagattgagagagagagagattgagagagagaggttgagagagagagagaggttgagagagaaattgagagagagagattgagagagagagagagaaagagagagagagagagagagagagagagagagagagagagagagagagagaatttccatactcagtcatctagggctgtttcccagtctccagcaccttgctattgctttcaacagtattctacctccctttttttccctcttaatgaatgatgtcacacttcttcacacttccatgaacaagaaatatggtaattcttttgaattcatctctcacattcatctcccattgaaaccaatgcttacatcataccaatttcacttgtagagttccccaaccatctcccatcattgcccataagcacaggtactgctgtaagctaagccaccaactcctgttacaagacagtacatctatcccctaactgttacagccctcctggttttgcttacctctcttcaaccattgctcacacaacacagctcggttctgtgactaacatgactccccagggttagctcactccttgttccggtcctccttggccgcagaccctccctgaattccacacataatttggataataattctgtgacttttcaatgttgcttcctctccttttacctagaacatgtacctgtttttagttccttggtcttctgcttttcattctagctcaaatactattttctggaaggatctttatctaaatctgcagaatgaactcattaaagcctcctatatgttccctctcccaagttcatttatttcttatttattcatttatttttatacaaagtaattggtttgattatgacgtttcatacatgtgtgtaattatacttgttgttcagctcccttgtccactcaccacacccatgataattgcacctcctaggtgctcccattttaacacccatagttgtggtacacacacacacacacacacacacacacacacactgcatctacattgatatccatatatgtttatgtatattccacttatgagataaaacattcatttgtcttttagggtctggttcattttctctagttacatccacttttgggtacatgctatgatttcatccttctttaggtctaaggaaaaacagcaattaaaacaccaaggccaacactgctgcaatatgctgcattaccttaactaatcatacctggactctattttccaataaagtcacatcaaaaggctagggtactaacatgtgaattctattgggatgtacaatgcaaccaatagcaagtgtgaattgctgctatcttcaggcatttgcacagtaacattaactttcagaaagtttttattaaagccccttatgaatgtagtgtgcactatggtggtctcagtagagaagtggtgtgtgaacggctgtggatacacacagctgccactctagtctccaacttgagctctacaaggttggaagcaagagacggagccttggcaacagcaacctctttctgtctaacttccttctaagccactggttctcaaccctcctaatgctgcaaccctttaatacagttcccgacgttgtggtgaaccccaaccataaaatgactttgatgctacttcagaaatatacttttgccactgttatgaatcataatgtaaatatctcatatgccagatatctaatatacaacccctgtgaaagggtcattcaactcccagagagatcgcaacctaaaggttgagaaccgctgtctaagcaaagtagatttagaattgacctactcaacatgagatgtgtaggcatgttggaagatgtaatttttgtcatgattttgctatcaggtaaggaaaaagtcatctctatgctcagcagtcggaagcagcatacccaaactgtcaggaactcaagaaagtcacaggagttcaaaattctatgaataaatactatatattaaaaattgtagatcccgggacccgccgaacttaggaaattagtctgaacaggtgagagggtgcgccagagaacctgacagcctctggaacaggcagaagcacagaggggctgaggcagcaccctgtgtgggccggggacagccggccaccttccggaccggaggacaggtgcccgcccggctggggaggcgacctaagccacagcagcagcggtcgccatcttggtccgggacccgccgaacttaggaaattagtctgaacaggtgagagggtgcgccagagaacctgacagcttctggaacaggcggaagcacagaggcgctgaggcagcaccctttgtgggccggggacagccggccaccttccggaccggaggacaggtgcccacccggctggggaggcgacctaagccacagcagcagcggtcgccatcttggtcccgggactccaaggaacttaggaatttagtctgcttaggtgagagtctgtaccacctgggaactgccaaagcaacacagtgtctgagaaaggtcctgttttgggccttcttcttcggccaggaggaggtccaaatacaagatatctgcgcaccttccctgtaagagagcttgccagcagagagtgctctgagcactgaaactcagaggagagaatctgtctcccaggtctgctgatagacggtaacagaatcaccagaagaacaatctctaaacagagtcaactataactactaactccagagattaccagatggcgaaaggtaaacggaggaatcttactaacaggaaccaagaccactcaccatcaccagaacccagcacacccacttcgcccagtccagggaaccccaacacacctgagaacctagacctagatttaaaagcatatctcatgatgatggtagaggacatcaagaaggactttaataaatcacttaaagaaatacaggagaacactgctaaagagttacaagtccttaaagaaaagcaggaaaacacaatcaaacaggtagaagtccttacagaaaaagaggaaaaaacatacaaacaggtgatggaaatgaacaaaaccatactagacctaaaaagggaagtagacacaataaagaaaactcaaagcgaggcaactctagagatagaaaccctaggaaagaaatctggaaccatagatttgagcatcagcaacagaatacaagagatggaagagagaatctcaggtgcagaagattccatagagaacatcggcacaacaatcaaagaaaatggaaaatgcaaaaagatcctaactcaaaatatccaggaaatccaggacacaataagaagaccaaacgtacggataataggagtggatgagaatgaagattttcaactcaaaggtccagcaaacatcttcaacaaaattattgaagaaaacttcccaaatctaaagaatgagatgcatatgaacatacaagaagcctacagaactccaaatagactggaccagaaaagaaattcctcccgacacataataatcagaacatcaaatgcactaaataaagatagaatactaaaagcagtaagggaaaaaggtcaagtaacatataaaggcaagcctatcagaattacaccagatttttcaccagagactatgaaagccagaagagcctggacagatgttatacagacactaagagaacacaaactgcagcccaggctactatacccagccaaactctcaattatcatagagggagaaaccaaagtattccacgacaaaaccaaattcacgcattatctctccacgaatccagcccttcaaaggataataacagaaaaaaaccaatacaagaacgggaacaacgccctagaaaaaacaagaaggtaatccctcaacaaacctaaaagaagacagccacaagaacagaatgccacctttaaacaactaaaataacaggaagcaacaattacttttccttaatatctcttaacatcaatggtctcaannnnnnnnnnnnnnnnnnnnnnnnnnnnnnnnnnnnnnnnnnnnnnnnnnnnnnnnnnnnnnnnnnnnnnnnnnnnnnnnnnnnnnnnnnnnnnnnnnnnnnnnnnnnnnnnnnnnnnnnnnnnnnnnnnnnnnnnnnnnnnnnnnnnnnnnnnnnnnnnnnnnnnnnnnnnnnnnnnnnnnnnnnnnnnnnnnnnnnnnnnnnnnnnnnnnnnnnnnnnnnnnnnnnnnnnnnnnnnnnnnnnnnnnnnnnnnnnnnnnnnnnnnnnnnnnnnnnnnnnnnnnnnnnnnnnnnnnnnnnnnnnnnnnnnnnnnnnnnnnnnnnnnnnnnnnnnnnnnnnnnnnnnnnnnnnnnnnnnnnnnnnnnnnnnnnnnnnnnnnnnnnnnnnnnnnnnnnnnnnnnnnnnnnnnnnnnnnnnnnnnnnnnnnnnnnnnnnnnnnnnnnnnnnnnnnnnnnnnnnnnnnnnnnnnnnnnnnnnnnnnnnnnnnnnnnnnnnnnnnnnnnnnnnnnnnnnnnnnnnnnnnnnnnnnnnnnnnnnnnnnnnnnnnnnnnnnnnnnnnnnnnnnnnnnnnnnnnnnnnnnnnnnnnnnnnnnnnnnnnnnnnnnnnnnnnnnnnnnnnnnnnnnnnnnnnnnnnnnnnnnnnnnnnnnnnnnnnnnnnnnnnnnnnnnnnnnnnnnnnnnnnnnnnnnnnnnnnnnnnnnnnnnnnnnnnnnnnnnnnnnnnnnnnnnnnnnnnnnnnnnnnnnnnnnnnnnnnnnnnnnnnnnnnnnnnnnnnnnnnnnnnnnnnnnnnnnnnnnnnnnnnnnnnnnnnnnnnnnnnnnnnnnnnnnnnnnnnnnnnnnnnnnnnnnnnnnnnnnnnnnnnnnnnnnnnnnnnnnnnnnnnnnnnnnnnnnnnnnnnnnnnnnnnnnnnnnnnnnnnnnnnnnnnnnnnnnnnnnnnnnnnnnnnnnnnnnnnnnnnnnnnnnnnnnnnnnnnnnnnnnnnnnnnnnnnnnnnnnnnnnnnnnnnnnnnnnnnnnnnnnnnnnnnnnnnnnnnnnnnnnnnnnnnnnnnnnnnnnnnnnnnnnnnnnnnnnnnnnnnnnnnnnnnnnnnnnnnnnnnnnnnnnnnnnnnnnnnnnnnnnnnnnnnnnnnnnnnnnnnnnnnnnnnnnnnnnnnnnnnnnnnnnnnnnnnnnnnnnnnnnnnnnnnnnnnnnnnnnnnnnnnnnnnnnnnnnnnnnnnnnnnnnnnnnnnnnnnnnnnnnnnnnnnnnnnnnnnnnnnnnnnnnnnnnnnnnnnnnnnnnnnnnnnnnnnnnnnnnnnnnnnnnnnnnnnnnnnnnnnnnnnnnnnnnnnnnnnnnnnnnnnnnnnnnnnnnnnnnnnnnnnnnnnnnnnnnnnnnnnnnnnnnnnnnnnnnnnnnnnnnnnnnnnnnnnnnnnnnnnnnnnnnnnnnnnnnnnnnnnnnnnnnnnnnnnnnnnnnnnnnnnnnnnnnnnnnnnnnnnnnnnnnnnnnnnnnnnnnnnnnnnnnnnnnnnnnnnnnnnnnnnnnnnnnnnnnnnnnnnnnnnnnnnnnnnnnnnnnnnnnnnnnnnnnnnnnnnnnnnnnnnnnnnnnnnnnnnnnnnnnnnnnnnnnnnnnnnnnnnnnnnnnnnnnnnnnnnnnnnnnnnnnnnnnnnnnnnnnnnnnnnnnnnnnnnnnnnnnnnnnnnnnnnnnnnnnnnnnnnnnnnnnnnnnnnnnnnnnnnnnnnnnnnnnnnnnnnnnnnnnnnnnnnnnnnnnnnnnnnnnnnnnnnnnnnnnnnnnnnnnnnnnnnnnnnnnnnnnnnnnnnnnnnnnnnnnnnnnnnnnnnnnnnnnnnnnnnnnnnnnnnnnnnnnnnnnnnnnnnnnnnnnnnnnnnnnnnnnnnnnnnnnnnnnnnnnnnnnnnnnnnnnnnnnnnnnnnnnnnnnnnnnnnnnnnnnnnnnnnnnnnnnnnnnnnnnnnnnnnnnnnnnnnnnnnnnnnnnnnnnnnnnnnnnnnnnnnnnnnnnnnnnnnnnnnnnnnnnnnnnnnnnnnnnnnnnnnnnnnnnnnnnnnnnnnnnnnnnnnnnnnnnnnnnnnnnnnnnnnnnnnnnnnnnnnnnnnnnnnnnnnnnnnnnnnnnnnnnnnnnnnnnnnnnnnnnnnnnnnnnnnnnnnnnnnnnnnnnnnnnnnnnnnnnnnnnnnnnnnnnnnnnnnnnnnnnnnnnnnnnnnnnnnnnnnnnnnnnnnnnnnnnnnnnnnnnnnnnnnnnnnnnnnnnnnnnnnnnnnnnnnnnnnnnnnnnnnnnnnnnnnnnnnnnnnnnnnnnnnnnnnnnnnnnnnnnnnnnnnnnnnnnnnnnnnnnnnnnnnnnnnnnnnnnnnnnnnnnnnnnnnnnnnnnnnnnnnnnnnnnnnnnnnnnnnnnnnnnnnnnnnnnnnnnnnnnnnnnnnnnnnnnnnnnnnnnnnnnnnnnnnnnnnnnnnnnnnnnnnnnnnnnnnnnnnnnnnnnnnnnnnnnnnnnnnnnnnnnnnnnnnnnnnnnnnnnnnnnnnnnnnnnnnnnnnnnnnnnnnnnnnnnnnnnnnnnnnnnnnnnnnnnnnnnnnnnnnnnnnnnnnnnnnnnnnnnnnnnnnnnnnnnnnnnnnnnnnnnnnnnnnnnnnnnnnnnnnnnnnnnnnnnnnnnnnnnnnnnnnnnnnnnnnnnnnnnnnnnnnnnnnnnnnnnnnnnnnnnnnnnnnnnnnnnnnnnnnnnnnnnnnnnnnnnnnnnnnnnnnnnnnnnnnnnnnnnnnnnnnnnnnnnnnnnnnnnnnnnnnnnnnnnnnnnnnnnnnnnnnnnnnnnnnnnnnnnnnnnnnnnnnnnnnnnnnnnnnnnnnnnnnnnnnnnnnnnnnnnnnnnnnnnnnnnnnnnnnnnnnnnnnnnnnnnnnnnnnnnnnnnnnnnnnnnnnnnnnnnnnnnnnnnnnnnnnnnnnnnnnnnnnnnnnnnnnnnnnnnnnnnnnnnnnnnnnnnnnnnnnnnnnnnnnnnnnnnnnnnnnnnnnnnnnnnnnnnnnnnnnnnnnnnnnnnnnnnnnnnnnnnnnnnnnnnnnnnnnnnnnnnnnnnnnnnnnnnnnnnnnnnnnnnnnnnnnnnnnnnnnnnnnnnnnnnnnnnnnnnnnnnnnnnnnnnnnnnnnnnnnnnnnnnnnnnnnnnnnnnnnnnnnnnnnnnnnnnnnnnnnnnnnnnnnnnnnnnnnnnnnnnnnnnnnnnnnnnnnnnnnnnnnnnnnnnnnnnnnnnnnnnnnnnnnnnnnnnnnnnnnnnnnnnnnnnnnnnnnnnnnnnnnnnnnnnnnnnnnnnnnnnnnnnnnnnnnnnnnnnnnnnnnnnnnnnnnnnnnnnnnnnnnnnnnnnnnnnnnnnnnnnnnnnnnnnnnnnnnnnnnnnnnnnnnnnnnnnnnnnnnnnnnnnnnnnnnnnnnnnnnnnnnnnnnnnnnnnnnnnnnnnnnnnnnnnnnnnnnnnnnnnnnnnnnnnnnnnnnnnnnnnnnnnnnnnnnnnnnnnnnnnnnnnnnnnnnnnnnnnnnnnnnnnnnnnnnnnnnnnnnnnnnnnnnnnnnnnnnnnnnnnnnnnnnnnnnnnnnnnnnnnnnnnnnnnnnnnnnnnnnnnnnnnnnnnnnnnnnnnnnnnnnnnnnnnnnnnnnnnnnnnnnnnnnnnnnnnnnnnnnnnnnnnnnnnnnnnnnnnnnnnnnnnnnnnnnnnnnnnnnnnnnnnnnnnnnnnnnnnnnnnnnnnnnnnnnnnnnnnnnnnnnnnnnnnnnnnnnnnnnnnnnnnnnnnnnnnnnnnnnnnnnnnnnnnnnnnnnnnnnnnnnnnnnnnnnnnnnnnnnnnnnnnnnnnnnnnnnnnnnnnnnnnnnnnnnnnnnnnnnnnnnnnnnnnnnnnnnnnnnnnnnnnnnnnnnnnnnnnnnnnnnnnnnnnnnnnnnnnnnnnnnnnnnnnnnnnnnnnnnnnnnnnnnnnnnnnnnnnnnnnnnnnnnnnnnnnnnnnnnnnnnnnnnnnnnnnnnnnnnnnnnnnnnnnnnnnnnnnnnnnnnnnnnnnnnnnnnnnnnnnnnnnnnnnnnnnnnnnnnnnnnnnnnnnnnnnnnnnnnnnnnnnnnnnnnnnnnnnnnnnnnnnnnnnnnnnnnnnnnnnnnnnnnnnnnnnnnnnnnnnnnnnnnnnnnnnnnnnnnnnnnnnnnnnnnnnnnnnnnnnnnnnnnnnnnnnnnnnnnnnnnnnnnnnnnnnnnnnnnnnnnnnnnnnnnnnnnnnnnnnnnnnnnnnnnnnnnnnnnnnnnnnnnnnnnnnnnnnnnnnnnnnnnnnnnnnnnnnnnnnnnnnnnnnnnnnnnnnnnnnnnnnnnnnnnnnnnnnnnnnnnnnnnnnnnnnnnnnnnnnnnnnattggaaatgtaaatgagctaaatacctaataaaaaatggaaaaaaaaattgtagatagatccatattttctaaatctaaataatacattaataaatcaactccctgattatattagttataagtgcgcacattacacttttctgtaatgaatttaattcttgaattgtacaaaataggaaccaaagcagaattttaatctccatgataacaactttataccaaaaatacatacaaaaatagtggcagaatgcatattaacaactccttgtgaaattctcagtgtactgattggatataaactgtagaagattacatttatcttcatgcaagagccttgaaaagacaagggacagcggtttattgcactacttggggacattgcagggagctggatacagcaaagagacagatatatggtggcttggaaataggtagcagtgatgctcacagtcaagatgagttgccaatttggaaaattaggacactagatttatcacatagttataatttctaatggtctgagaagccgtaggtctgaccacatcaatacttggctcagtttcaaaacagaaaatgctgaagtctacaaaacttcaaaactacaaagaattgactagtgggtttgtgtatggagtgaactcaagattaaatggtggtaaaggctgccttcctcaaatcacggaagtggaagatgtaattatccgaaaaaaatatgtaatttttaaaaaatcatgtttgtaggcatgttgaatgcatttaagaaactaaaagctcttgccacttggtgtagaatctggacagataggtggtgggcacgtctaggaaagtccctctgtagtttcagcttcttcagagatatttggaggccttctctgacaacttactaagggctgaactttaagctctgtggttggaagctcctcttgcagtgcaagccaatagaaaggttgtggcatccaaggaaacatggacatactctgatacttaccttacattgcatatgcagactaagtctatcttcactgaatttcttgaactattgaagagtcaggggaatatctttaatacaacacatttccttgagtggtttgtggccatgtgtgtatcttggtgaatctaatctaggtgtctaagatgcatttacacaaatctcattaaaatgtcatgggaaggtactgaatgtccaagagacctgaaagtttattggtctgttttgggcttttttatgtctggccaaagagtcataatgtaccaggactgcttagaactcaagcacactataagttaaaaccatcatctttttatggtctagcctaggaaacctcagagttgattcataattcacctattcaaaatgctgtgataccttgtatactaatgctaattatatctaaataccaaaacaaacaaacaaacaaacaaacaaaataacaacaacaaaaatcccacatttagaatagcattacctgagtatcacataagtcctttccacatgactaaaaaacacctgatacctttaaaatattcacccattaaaagaaaatcaggcagaatcatatgagattctgcaggtttaaattaattttaagttttacactatcatctgtttagatgagcaagaatttgtaacttcatttttagaaggtgaaagagaagtggctggagagatggttcagcacttaaaaacacatactcctcttgcagagaaccagagtacagagcctaacacctaagtcagccagcttccagccacgcgtcactccatctccaggaggtctagtgcctttgtggtacatgtatgcacacacacacaatcatatctacaagtaaatattttttaagagaaaaatacaagtacatatggcagggaattgcattgttattatatcatgcagtgtaaggtatggctgagcaacaacagaagcaatgcctagcacaccccataatactgtaatctattttaagtcctttctccatgctcagaagaaaactcttttagtttggatttatttaaaagaagagaataaaaagaaagaaagaaaagagaaaccaaaattctaaatcttatcataagacaaggaacacctaccataattggtataaaattcagctctagtttgtccctaaaaacaagatgcttaccccagcataattcattgcctttctaatgttacatacttgcattgtaaaaaggcctattcctatgtggctaacctaagtggttgctctttgaatttaatgtgtgctctgtgcctcaagtcagcaccatccaggcagaaagtaagaaatgagcgtaaacttccttgagtaatagactttcttgggaatgggtgcaacctgttcaaagatgctacaaacataaatggaaactgctttttttcccttttaataaggatttctaatacaaatgattcaattgttcaattaaagccagagaaaaagatagttgtggttgtgtaacattaaggacataatttaatgggtgtctgaataatctaattttagtttacagatgtaacatcagttaatcttacgcatatcttcatttctcactttttgcttctttcagatcagttaaactctaaaacagaccaactcatgttagtctagaggagtttattgacagtgagtcctgcaaccaactgaaaattggtggagttggtgtctttatgctgatgctcgatcagtccggggttggggggaagggcaatgatactctccactagaatgtcagggtgtttcattgttctgcatgcccattttctttggccactcctcatttgctcctggacccagaggctcataatttgaatgtttggtacccagtggatggaaatgcttgcaaaggattaagaggtaatgccttgttggaggagttgtgttgttggggattagctttgaaatttcaaaaaacctgccccattcccagttaacactctgttttatggttgttatctcattatgtaaactttcacctactgccccagtgccttgcctatctgactgcctctatgcttttcgccatgaaggtcgtggactcaccttctgacactgtaagctgacaataagttctttctgtaagttgtgttgatcatggtatctcttcaaagcaatagaaaagtaactaagatactcgcctaatcttgttactgacatatatgaatatggtaggctaccggtgactataatgcctaaagccatatgtatctcaagctagactcgctctttcccaccaaagctgcttcttcaagtggatgaccaaggaagcctaactttgacattttctgtttcacaagccatatattcagtcccatcggacagcccctctgcccttcttcaagagctgtagtctgacaatttcttgccacctccattgctctgtttgtctttctcatctatattactgcttcatgccccaattggtctcccagataccgtttattctccaggcacagcaaggcggggctgctaagtgcaggctacagctttgctccaagcttcagaaaattccaatcttcctaaaaatggagatgaagaacctgtgagcaacctattgcccgtggttgctactgtagttttgacttcactctcgctatgtacctgtggttggtctagtcttttgctctgctctcaggcctacaggcacagtgctacatcaggggcttcatgcttcccgtcacttcagccacactccacattccctgggatttcttgttcagtgctcagctctcttagttcatctccccagccactttagtagttcctggtatttggaaataggtagtcaatgtttgttgaagaaatgaatgatcactccccaccttcctcttggatagaagcaaaaaataataaaattaagaattttaaattatcaggcctgtccatatttatatataaatataatagtccattgtgatcattgggatatataagaacattttgggcacatttaaaacattgttcaaattttttttaatctaaaaaaaatccactgtctatcaaggagtcagaagacatattgtattaattatttctgggtcattaatgaactttactgtgctgttgccctcagagcactaaatatagccgatatcaaaccaaagatccttcaggatccttgagtttctgcagaaatattcaggcttatgggaagaagttttaatgagacattgtactgttcaggagagaagaaatcatagtttctgaccccaggggcattgataaaataataggatgaaagctccagggaaattagtttttaggaagtagaatccagtggctcattgcacattctaaatagcatcggagtgagaatgacagcctggctgattgggtttagtgatgcggatagatttggttgttcgaattcaattgaaaacccccagatatgactgaggtttacagagatataaagaccattgggccaaaaatacattctagaacttcttttgagttagaatggttcatgagtccaagggagtcaaaaattataatttcacagttacaattttaattatgaaaccttgataatctgtagttttcactgcctgtcctgatttattacaactgcagacatgtctgaaacagttggttcatagcattcattgtgtatgcccaggaggatgcacagctatgagctgacagcaagccagttcacatgaagcttaagttggagaggggtacatgtagacagccacatgaatgtacagtgctctgactgctagaaaagaaatgaaaaggaaaaatggactacaagaaagaagagcatgagttctggatgtcaagccagtgttatctgagtatccacattccacctcccccagaccagtgtttctcaacctgtgggttgagacccttaaagactagtggaaaacagatatttacatcatgattcacagcagttagcaaaattacagttatgaagtagcaactaaagtgtttttatggtagagggtcaccacaatatgagaaactgtattcaagggtcacagcattaggaggcatgaaaaccagtgtcctagactctatgttgaagtctaatttcagtgtggttttataaagtggtagaatctttgggaagtgattaagtgattgagaaggaaacccattattggtattattgtcttcttaaaagaagtaagagaagccctgtggtggtttaaatgagagggattcctacaggctcaaatgtttaattgtttgatgcctagttggttaaaatgtttgagaagacttaggagttatggccttgttgaaggaggtgttacttgggatggactttgaggtatccaaaggctcaccctattcccagtgtgctctttctacttgtttcatgtggtgtgagctcttagctgatcttccagccaacatgcctgctgcttttataccctgctgtgatggacaattatccctctgtaactatagcccaaaataaacccttccttttatacagtgccttgatcatgatgttttatcacatcaataaaaaagtaaaataaaaacagtctttctcagcacatcagtgaagagattgcagttcatgaacctagaggagatcccttcccagatagactctaacaaacctgacagtactttaacccccagctgcccagactcctccactgtaagagataaatattattttatttggcagccaccaagctaacagcattttgccacagcagcccaagaggactaagccaattatggtgactgtcctatgtatctattaaataatattctgtgaagtattgagtaagatacacatgtgcatcgcctataggaacaaccatacttggagtctaggtcctgattcttcctattttctgagtaaattctgttgagacttagtcaaatcagaaccacgtgataaatttcttgttataggatggatgactataagaaacaaagcaatacaaattaataatgaataagcaagttaaagcacaataaagtaatggatttttacgtatatactatccaatctgctagttaaaaattgggtcaaattaaaattaattattgaatcttagctaattgtcagcccacttccagaaaaataaattccactggctcacacaatctttatcacccatttatgtcagagactattaggaatgtcttcatgtcagcctatactggcctctgtactgcctcaccccatgttcagcaggcactgggaagtttgcactaacagcttgtggttcacctaaacttacctgtggaggagaaaggagcatgtttcccccaagggaagacagcatctgagctgcttcttgccttttcaacttttaggaatctagtgaaaataattcttcctgtccctatctgcacactttccaacgggaagaatttgtgtgctaatcacgatcgaccctttctttgcaggaaccttcaacttcagggttgagtcgagacatctttccatagatggaaattttagctgttggatttttctttcaatcttaatgacagtgagctatctcatgctacatgaacaaccccaaagcttcagttatttataacaataaatacttgcttttccttgatcttttctatgcattagagactggtgggaggtagaggaaagatgtgttccttagttgcagacatagttggttagagaataccatctttaaaaatcctactatatgatacagtggagaagggtatcatgcccttgttctcaaagttttttccctgaaggtgatacatattgctggtcacttttctcctctgtctcttcctcacttgcttctttttcctttgtccttccttcctttctcccctctcttctttcttcctctctcctaagttatagcgatattaagaagacatgtgatgcttatatgcatttaaaaagagagatgaatatcatatccattgctgctcacattacatcagctaaagtcaggtgactgtgcctgtcccttggggtgcaatgacgtgcagacttaccacttcccttaaaggagaattggaattctgaaaggtcatgttggtgacaattacacttcctttcttcaaatgttgcttgaatggccttctctttgcttcctccccaggtcttccccatcagcctgtgccatacctctacctgtgtagtcctcagccatgtaaatggctcaaggtttccctatagtgtgtgatggttcttgggctttgttcatcttgaggattactgttgtcctccatgagttactgacagtctcagagaggggagtactcgaaaacaaatgcacttagcatcttgtgtatctgacctcaagcattacacatcacttctgcctgatagacaaccctgcaacagagtaagaagcaactataatgatgtaaatgatggcgactatcagaagctgggtgtgattcctaactacaagctcggtaactctcacttaaacccatggtgacaaatatctgctttctgacccttaggctctgcaaggcagcagacctagcgtggggtaagcaaactttaaaacatgttctgggggaggggagttggtcttctgctttgcaatcaaagggctctcatataacattctatctgttcagtacctaaagaaacacatacactcttccttggcatatttgcttcatttataacactataaatgctatttttaagtgtcttgtgttcaggtggttgttacacttgaaatggtgacaagctatatatatatatatatatatatatatatatatatatatatatatatatatatatatatcaaaggggagcaaggaagtacttgatggtttttctggtcctttccctataggagcatgagttgagtaagctaagtgtgactttaaataggacactgggaggaatcagaaatagtggcacagtggcagaaatcccacagcaaaatccatccttgtccgcactctgtggttatacaagccaggattctttctagactaatgaagaaatcgttgaaaaatattaggcgaacatgcagttctggaagggaaaggcagttctttggaaggcggggctatctgtggctacagtattaaggaggaaaggaatgtgtagacaatttcttttctgcatccagaatttgaaagaacaagggtagatctagcccgtctcttttaagaaagcccacttcgtgagaaacaagcctgtcctcctagctgggtcaaccattgaaggagtttttatttatttaatcagctgcttcttaccccagcaatgtgtctgggacagagtcaagcaaatcatgtacaggttgtctgttagggtctcaccaaaaaaaaaaaaaaaaaaaaaaaaaatcccccctcttctttccttctttcatgatcgtccctgagtttggttgtctgtgttcaactgtcttgaatctctcacactctaaattccagcacactcaattctagcactctgaccgctaaaggtatgctgggcttctcccacctcctcctctcacctccctccatcagtagcttactttatcccaagataaacattgccctcccagtccaagctcactctatttcgctgctcttttcctctctcctgcttggtatgctcgtttagtcaatttgaccaaaagactttcctggcagctaaaaaaaagaaaaagaaaaagaaaaaaagaaaacccagggtcacttaatagcaatccaatattgtactctttgctgtttctgtaaaatgtacagaactattcagtgattggattgatttttaatgatctaagtgatcaggtgtctcaaagctgtactgcagcagctcgataataacgtggagggggaggggcttggacactggaacagtgctagaatgaagagtcccacaaacaccagccaagtagacaagataaaatgtaagccattgccaaagttgtttattagcccttttaaagtagcctagctactttaattttcagatggaatgagaaggaacttgatgaaggcttaaagaatagccaaaaaggttcagggatcaaaacctaaagctatgtttactgctgacatgcgcagaatgctagccaaatctctctccgtgtccccagatagtatgttggtattccaaaagtagggtgagatattggtcttttttaaaaaaatacaataaaataaacttgagtgaggtcagcttgacccatactgattttacatgtggaagaagaaagagaagcagaggtgaaagaggtgaacaaagaataatgaacgactatgaactcatctttgggttaccccgccgtgcagcgtcaagagacctgtttaattatccagtgtctgtctgtctcgtcccgaaacttataaacctgcagggctttgggtgggggttgggggacaaagtaagtaagtgagagaggcaagtcaagtgttgatcatattgtctggcactgaccagctacacggctcgtaattaattctctgctccactgtaccggctcccaggtccctcccagcctgtttcttgtccataggacagtgctggctccccagcacgatgtgtaaatggaggtttggaatccaatctccttccacccgttttatgtcttggccccgcggcaacttctctagattctttgatcttattctctcttactaagtgagaggtagtaatactggccttaccgctgtcgagggaaatgaccagtgtgagccttagcgcacaaagcgctccctagaagagaagctcaaaggcatgggagctggattgcacttctccccttttctaagttgcctgttcctaagtgctagtagagagaagttaattagttcttcatgctaattattcattgggtgccctcaattaatgcagtgtatccttttgagaaactcagctcaactgatgttagtggagatgtacagattgggagcttacacgggctgatttaggactcactctgagacaaggactttttctaagtgtgtggttctaaaaatactacagcactcttactctgtgtgggtgtgggcgaggcagagcgggtgtagcaacaatcttacatagtattgctctccgtactcaggagatgctacccccccctcgctttgctctctgatgctaattactgaatcagagcagacatgtcagtaacagatgagtctcactgtgtcaccactgtccaatgtgacagaagaggacatttcccaatactgctggaagacgtgaccaaaggaagtcttagatgattgtgtgaaaggcatgtctttgtccttaagatgatatctcctatctcctctctctctcatatatatatatatatatatatatatatatatatatatatatatatatatatatatatccttcatatccttcatatccttcatatccttcatatccttcatatcacaagaaatccaattctcactgaagaatgggccccaagactgtggagttgaaacctttgcttgaagatgtttctgggacaaatccgatttggctttcctcacgatgatggtctttcttgtgtttttcaaatattggaaggactttggcagcaaagtaaatcattgtatgaatctgggttggggagagggggtgaagcataaaataagagatgaagtcacatttgtgagttatttctacgttctataataagccttgaagaatagcaatcctattaaaatgcatgcagagtttacaagggctgaaaagttaagtacaaaaataaactattgtacagaaccattccaaaaattataaatagatagaaaaaaagaatgaacctttgtttggcaattataaatttatttttgtcctctggaaaaaatcaaataagactcacattttataattattatctttgtttacaaaaaaaaaaaaaaaacactttgagcacgtgtcagtcagtgaccactttagtgtcttcaactttattatatacctggagtctggaattccctgggatgtaggtaaaaggtcctttgtgtcctactcaagtttaataataataataataagcagagaattagatgtaggagttttagatttatagacaatgctaggataaatatccatatgttgtataaatgtttgtatttgagagataatatatacatatacatacacacacatatatatatacacacatacacctgtatatacacaccacacatattcaaatgttgtacattaaaaatgcacagctcttgtgcctatgaactgcacaggtctgcccatcccccaccctctccatatcattgaatactacatttgccccctcgacactatgacagtccctggacttcactgtagttatatttcttgggtttctacagaggttcaccttctaactgcgtactagctgcttctgtctctccttctctggtgcctatttgtagcgtctctcacatttctctcaggttgttggttttgtgtgagttaatccacagggtccctttaaggtgagtaatgaaaaactcgcctcctatggctgactttccagccgccactgccaacttaccttgcgtcagtggcgggtagtgctttcgttcctcagcctcctcagatttccacactgcagactgccttctcagcttcaccattctcaccatctaggtcagcaagctatgtgggaaatatgtgacagactcaaggagaacagatacaacaaattctactctcatatatgccctaattaattaaagctgtctagtcaaacctcagatggatccaagacaaataaatgattttattttctagagaaaaatcaacattattcagtaaacattaaggaatttggacaaagtaatcagagccaaaatgaaccccaataacacaaacaaaaacaaggaatctgtgttcttcttgccaaacctctttttctccagacaccctgtgagcctctgacacaaataagttcatttatatttggaggtctgagatgtaatagagaagctagaagtgaatcttagaggatgctggagatggagagtggggagagactgttggtccaagggataaagttgtcccaggactgatcttgacaatgacaaatccctgaagtgtttatggggaggggctgcatcagcgcactgaagcatgtcaccccacagcaagagaaaggcagttcacccagcaaactgagtgcgtctgtgtttgtgaactgacaagaaatcatcacaagccaatgacaatgacatgggctggggaggagttaagattaatgattcctcattatggagtgtcattaacacaatgaggaaacaaaccgaattttcctgcagcatcctccttccccatcccatttgtctccctgggaagaacactccttacgacttgacctgtgggtaccaagattgtaagacacaccttcttgtagtatgaagaacagttagttatgatagcttaggccaacagttcacaattaattccacctaggacttgttacattaactcattattctgttgacattctgaatgtgctggtctgcaaacatattgttgtcagaggttagccacccactgtttctctgaaagtgatgtagtcaggcacacccacatcatattgtggaacagtaaagtagaggtccacttggtcttctgtatcagcataaagagcagttaggtttgcacaggacgactgataacccacaaatcatcttctgatgtgtctgagatgggatgtggtccttggcatgagtatcatcaatgcagtgacagaggaggagtcatttgggtcctcttgcaacctccaatgagagccaagccatgataaggatggagacaccgactgcgcacagcttttgtttgtttttgtttacatttgttgtcacaggtgtcgcggcactgtaactgttgttgctgttcagtaatagcagttgcaattctgaaaattaacgtaaatgtttgctgctgaaggtgctgtgtgtgtgagtgagtgtgtgagttcacccatctatttggaaagaaaggggcagaaaatgtaagtctctcattctctcccatataacttccttgagtgtattacagtgggatttcactgtgacctgtgacagagaacatgatttgactagaagtttagaactcccagtgtgatggataaagacagataaataaggaagctgtcgtgaagtttcatgacacaagtattcaggggctcattctaaagagaatcacctgagttttgcttggctgttgtaccatattgcacggttactcataatgattccttattaagacaatataggtttgcctagccaaatccaaggtccaaaagatagaaaggaagttagagagctagccctgaaccttttcctttttacctttctcctcaagaacatctgggggaaaacatttgattcccagtagtaagggtgtgttggaccagatcactagaaacccaagagcttgttgcgaacctgatgaagcagcagcatttggagcagggaaccaagcctgagtgacaggagttatagccacaggcccagcagggctgctgctgctgctgcttggtccacagaatcaccggttacacttcccaacatttgccaggctcttactgtgagatgccatctcatgatggtaccaactgatgaggaaatggaaacaaataaacaaacaaacagcaccaccatcacccccatctatccttttatctcttctctttctcactttctaaccccagcacaaccagagccaatcatatctgggcaggatggggaatcctcggaagaggaaaggatatcctgtcctctcccccagcaaataactagtgtgtgaggtcccaaccacagggttatacataaggtacagtatggggttagaatttggagcaagcattcttgtggccaattgtaatcttagttgctatagatttaagaatgtacatctctggtagtgctctgaaacaaaccacaaaatgatgcccacaagcaaacctcaaagagcagtggaaactgaagaacatgtgccaacacgtgtcccgtgttcttgttttcaacaaaggtgttacgtgtccagttttgcccagtggcaaatattttaaagtgccttgataccttactatatctgtgctttcagactttcccttcctagctccctctagttctcttccactctttagatgcctatgtcccaacagagcccagaagtgtgcagcaaaggtatagaaaggatggctggctggacgggatgtgacagcccttctcacccatcttcatgcttgtgttttcctttgtctcttcatcctttctcccttctcactcataggatggaactttatgaatgtcattgcccctgtccctatagtttataaagaggagacagagagaacagggccatgtggatgctagacctgtctcctagtaaagaaaacttacccaccctcccacacacattggcagccacctctcaaatggcctgtgcctctaatcagctagtcatttagggagacagggagaaaggcaagttgatactttcattaacttcctctctacttccgaaaaacttccactcttaaaaatgaggtcgagacttcagaaatcaatggggcttgctgagcattctgctaataaagacccagggctcatctgcctgcttcctgccgtctttttttttttttttcctttgccccactctttgatgggtcactaatctcaaaggaatgggacatgagaaaacagaaattctaaagcgaaatcacctcctagtgagctgtgctgctctatgtcgtgagcaatccgaaagattttgtgtcttccttcagcttatgaatcatggaattgagtacagggaagccatatcggaggcaactgggctctctcccttacaccatgcttctcaaagagctacatacagtagctgagcaaaggcaactccacttcatgttggtctcagtgattggacatttgttacttgtgtggagtctgtttattacatctattaaataacctgtatagcccacattgatgatgttagaggtggaatatgccaggaccagagataggtagggcaggtggtggtagacacagcatttaaacagcagagaaggtgtaaaatataaggtgaaggagaggctttctgtttatagtatgcatggaggattttaaaattacctgcattgcgaatttattttacactcaaatgcaaataatgtttcagttaattataccataatgcctttaaaactattaattattccaagataagttgttttaacaaagttaatgtctttgagcattttaatagttgttttagaataaccatatgaatgttcttttttaactccctgaagagaaaatttgtcttttagtactgaatttccatacccatagcacacacacataaatcacaatatttaccatttccacgatctctatcttccttcttagtaccctctttaatccaaacatcctttttctaaaacaatttgatattcagtgacaaatacattaaggggctggtgaaaatcttggtgttaatattatgacttgaactgaagtacatgtcagtcagagcaaagccatgccatgtggaacttctggatgggggtgcatactggagctacatacttagctccagtatgtttggtccagattaaagcctatgtgttagtccattgtggctcttcagtatcataacagattattcattttaattgatttgtatttgaaggaaagaaatcgttgaaaagacagataagattttttttaaatggtaacttagcaagattttaattatgagtagaagtgattgactcagaccagatgcacacacacaaacacaaacacacatgtgcacacacaagcacacactcaacaacagcagaagaacaggaaaccctcattcacagtggttacacagaaatgtgcaaaaacaaatggaccttgttagatttaggaaactctgggaataagacagatcgtctgttgggtaccatatggctaacattttccatttgcccctgtgtttctactctctgatgtctcctctgtaattgccacccacatcttgttcatcagcttttacttaaccctaagtggaatcttcctctgtatgtcattgtgagaaggctttctccccgcttgcattaattaaagtctcaatgaaacataggacccactatgttctaatgatagaacttgctgaacatgacaggacatgcctctaacatcagccttcggaaaggtggatctctgtacattcaaggccagcctggtctacagagtgagttccaggacagccaatactatgtagagaaaccctttgtcttagttaggattactattactgtgatgaaacaccatgaccagaaagcaagtgagggaagaaagagtttatttgatataccactccttacagctgttcatcatcaaaggaagccagggcagaaactcaaacagggcaggaacctggaggcaggagctgatgcagaggacatagaggctgctactgactgctttgctccacatgactttttcagcttgctttattatacaacccaggaccaccagcccaagagtgggcactacccacaatggctagactttccccagtgtgggtgaagaccatagtgcttccaatcatagacttgcatggtttcttaaagaatataatgagcttcaagtttacaaagaagcatgaaatcctatctcacctattgaaaagacacaagactatctccacatgtgcaacacttgagatgtaattgcagagatatattgtcagatgtggatcaagcgctaattctttgtcccctgcaagagcagtaagtactcgcaatcactgagacattgctccagctccagattatatgacttttgaaacttgcagaatgagtgacagaactggaaagaggtgttaaaatatcaatgacaagaaatatagttagcgatatctgatcagtgaggatgagtcaggcaaaacaagcatgcagcccaatgcctctcttgatcttaccgcaaacatcactttctttgtcctgacccactgtgctgtgttatgtggagcgtatgtatctacaacactgtgttgtggagggggtatgtgtctacaacactgttttgtgttgtgtagagggtgtgtgtctgaaacacttaacttacacaacactgtgctgggttgtgcaagggtatgtatctacaacactatattgtatagagggaatgagtctacaacactgcattgtgtagagggtatatatctacaacaatggttctctggattaaggaatgctacaaacactgaaatccatgtttgcatatactcatacatttgagcttgatagtgacattttaaggatatttgatcagctacttcattttgccaatagacatgtctttactgataatagtcctaactctgataattgtatcttgtcccaagtgcagtattcctgtagatgcagaagactgaataactcagctggttatatacacacataaaactccaagttaacagaggtaatgatctatgtggaaattttgcattattgaatgtagattttgaattcaaccattgagcttttagggatttggtttggtttggttttggttttggtttagtttggtttttgtttgtttgggttttgggtttgggtttgtttgggttttgcttctctgtgtagccttggctttcctggaattcactctgtagactaggctggacttgaacacatagagatccacctgcttttgattcctgagtgctgggattaaaggtgtgcaccaccaccgccttcctgagtttttggttttaaagctgaaagttccctaccctttcagagagcctaatgaatattagaaactcaaaatttgatattataatttgaagttgctaacaaggattgacacctgtttctcaacattaaatatagtgtctcttgattttatcttttaactataaaacaatatatatatatatattatttttgtctatgagaatctcacacatgtatgcaatgaaatatgattatatacaacctgcatttactcctccaactcctcttatatttatcacagtacttcttcttcctaacatcattttctcctcctcctcctcctcctcctcttctccaactcctcctactgtcctattagtaacccatgaagtcccattattgctacatgtgtgtgcctggatagatggctagttactggaacataggaaattaacccaaagtctgtaagactttgaagattcaaataactatctcatcagccttctcagccaagaacccgtcagtaagaggtagtgcttagcgatcttcttacctacctagcttgatcccgtgtaggggttgggggttgataaagatgtgtcattcagggttgcgtacataccaagtcttcagtctcaacaccttctgcattgcaaagagaagctcttctgaccaaggttgcgagcagtccatgattatggccataagtatatttagaaggtaatttgatcatattaccatttatcacaataaccctagcagggttcttctcggggggggctctgaactccctgaccaaagtcttttgacccgggttactgtgacaggtggaatatgttccatgggatagatgtcaagtccaatcagaaagcagttagtaaccccatgataggtctaccactgtcaaacttgtaggttttcctagaaggtcagtaaggagtcctatgtagggcctggtgctgagtaagacagctgatgtcttttcttccccagtggtctgcatgggaccttcaggcaccaggaaaactagtgagcagggaagacttttcacagtcaatttgagactgatttctctacatcttgcacccacaatatgtggtatcttcaacaataaggtcttatcatgtaattatggtggtaatcaaggcaatagaaaaggttttttctaaatagtcaatcaaaacatataaaataaaatgccatacatatatattaaattattgtatatcatagtataatataattatatatataataaaaattattttaaataccctttgcttttattctgtgtcccaagagtagctaattgagtgtgtcttgctcatgtttttctcatctgcactgacaaaaaccaaatgtgttagcacatatgcacgtttgtaagttcatactgaaggtactgttctaaaatgctgaagtgttttgttttgtttttaaatatagtattatttcagatatttttccgagtaatctgtttagaaatcctacagcatgagtattatttgatgctggtctctattccatgacagatacttttatggtttgaatttgtgaattattgtcttggaatatttctggcatattggtgtatgaaataggatgcaaatcctctagagcttttaagattaaaatcaaatataatttcacatcaggagaagattccttacagtaacaaacttgaggtttgttgttgctttctgtttttccatttggatacaagtgaactgtagccttcctgaaaaacctatattttatattaaaacaagcacattgaaatacacatgaatgctcttcatattacacttagtttataatttttagcatgtatagtaaaatactataataaactatatatgcacatatattgtacctatacacacactgtacacacacacacacacacacacacacacacatgaaaatacacacacagatatgactaactaaattgtgtctcaaagaatttagtgagttggtgaaaggtacacaatatgtgaacaggaagaatttcaaattaagataatgcaaattaaatgatagtgataaattttaaaattttaaataaataaatgtttattgaataagataaatgcaaattaaaataattaaaattctgatttttattttcaaatatgctatgaatatttccatattttatacttgaaactaaatattaagtgccctttcttatcccagaaatttatattctacctcttctactgctacaaatacttctagtggagtttagtgaatgttctagatgctccagtcatgaagtgcactgcattggatgataaaccacttcttttgtgaacgtatcttctcattgcttaagagagaaggtttaagctttgactctatggtcccagatgactaatttttaataaattaaatcatgaacaggttaccaaagggcctgttagtttttagacaatcaagatagtttttttagtaaatttcttttttatttcagttggtactatttctcagttacaagaatatgtgggaattgaatatagcagcaacgtgctgggacaccacacagttccctgatgcttagcagtctaaaccctggcttcatgaagaacttctcttgtttcagttttgaatgtgctgaacagcacgccttcagcctttgctcaaagttgtcaggaggataatggcatcattattgacatggtcattagttaacatttagtgagtgccaataaagtttttgagtgtcctaaacacaccaaaacattgaaacaagtagattgtaccttacagaaaaatctgtatttatattgaaatgaatgtattaaaatatatgtaaacactttgtattataaagtagcttataatttgtttctgtaaataaaatactacaacaagctatgtttgtacacatacttatatactatatatatatatatatatatatatatatatatatatatatacatttacacacatttttatgcccctctcatattcacatacatatacatatgtgtgtacatgcatatgtgtttagatatggatatatatgtgtgtgtgtgtgtgtgtgtgtgtgtgtgtgtgtgtgtgtatgcatttatatatactaaaagggatctctaagagatttagtaagctcttggaagttatataaatgaaatcataaaaatgctttagttaatattttcactaaaaagttactcaggggccagggaggtgggggtgggtggatgggtagagaaacaccctcatagaagcaggaggagggaggatgggatttcagggagaaaccaggaaaagggataacatttgaaatgtaaataaagaaaatatccaattaaaaaaagaagaagaagaagggtcagaaacagaaaactcataaacaaacagaaagaacctgaattcagtgggcagttgttgtcacctcccattactgagaagcacaagaaggaactacccaggttcagaggccagtgtggggctgtggcacgctgtggttacaatagcaagacagggtgacttagccttttcatcacctgacagggacattgaacattgaaggaatgtgaagagcatggaatcttcaaagatcaagaaagaattgcgaggttttgaagaagcttttggctctctgttcctcttttgtagaaccaaactttgaaaggaaagagtcaaaaaaaaagaggaaccccgaaaccctgagacccctgtctctaccctggctcacaggtggccaaaggcagctttaccaaattttagatttctaagcatttgtcaagagtcagcctccttctcacaaaaggattttattagaaaggacaggggacaacgggtagtgcccccattctttttgctttgggtctgtgtaaagtttaagcaatattgtctaaacgtctatgtgatgtttgtgttgatgcatccacttgcacatacccttggagacagagatcggggcaggcatctggtgtcctgctccatctcttgacacagattctcactgtgtgctggcaaactttggaagtccccctttccttgttcctccacaaaaccatggttatgggcacccacataaccgtgtccaagtttctgcgttagtcctgtgaacgcctctatttgcagaacaagtgttacacccacaaccctgagtaactttaatgaaaacgttaagtgttttgatttgctctatgtttaagctcatacttcaatagtaagttagctgtatttttcctcacatctctcatttgagggtagttaatactagtctagccttgaacgatcagctaatctcgggctttctgtgggactgaaaaatttaaagaccacaagacatggtcagtcttggtgttgcttgatctgaggctacagcctagccacagggacctccctgaagtctaagagtcagtggggagtgattggtgatcctttgcttatcagaactgaggctgggatgagctagagagcctgccatggttcacccagacttagaagttctgtaaagtgaccgttgtctttcaatataacaaaacaagaaagtcctcaacgtttttttcctttttagaacgcgtttctaagctgccacactactctgcctgttgttttctgaaaatcacacattcattcattactgtctcatgaagcatcattttgtaatttactggccgtagctcttaaaactcagaacctttcttttatatttgacttacatctgcaaaactactcaacttaaggttactcattaatttgtaatcttagctccctggactgggagataaattatatttttctttgttaggcttcaagaattcttagtgcttattattgtttttcagttgttactatctagcttgttttatcttatttgaaacagttacatattttaaaaaagaaagaaagaaaatttcaccttaaaaatattaggctgaagggcgggtatttaagtcagtgactgaagccatgactaacatctgtgaggtctcaatttcagttcccagcacttggggggaaaaatcaattgatgtttcttttaaaagtatattttaatttgaaaatctcatttaatgacctaataactgagtcattttgtgttttcaatctataaagtgtctgcttatgtcattgtccccacgtggaaacatagctagccagtatcagatgggaaaccgtgatgcctggaaaaaatttgttcagttatttgttgttgttgctgttactgttgctgttgttgttgttgggttgcatagatattccactttggcctatgaatagaatggaaatagaatgtactaaaaacagacaaaagtgtcaagtgaaaatgcttattagaatggaagttatagtactagcttatttttgttttttacaaatattacgacgttctaaggagacccgcttgctcacctggcatgagaagaatgtcctggttttgaaatagttaatgcctgtcacatcatccctaccataaaaggaaaaggacagatgcctataacctaagtgggccccagagcttcttctccccgaaagtgtgatgatggacaattactagcccttagagttcattctccaggtggcaaaactaatttggggggaatagaataatacaggcaaaaatcttagccatgtggtcagacttctttctgcaaatgtgttatttgtcttccagcaatatttaacttctgagtgcctccactcctctttggcaccgggtcagagatcatctccgcctcacagcatcactgagtggattaagtggggttatcctgtgaagcacttagaagatggccagggacattgctagtacacctaggtcttaaataatgatatttaagtatacactctaacaaaccagtttgcattactgtgtgatacctgattgcaagcgttgagagtctgctgagaacaattccagccgaaagggttctgggaaggctcacaaatgaccttaggagagagatctggtcccttctacacaaaggtgcttcaaggacattgcctccatcacaggaagtcccagtaactttcctcatgtccctttgtgctacatggtgccatctttctgcatgcacaattcaaattgctttaaaggaatcctctagttcttcctcctaccaggaatgaattcttgacctgggaccatcaattcatcaaaccttagcagttctgaaactaattccatttttattttaaacatctgctttagaatttatgagaaatgaatcctcttctccccagtaatgtttttttttttcctacaaggacaagaattcactggggaaaccctaagtgaagatgaataggatgttaagtgttgccagtattccttttaatatgaagcaattgcataatggccttctttaaacacccaagttaaaagagatacgttaacgttgcgcacattaccacggagaagcccattctctgatttcaggcaagcaccattcaagagccaacctactattccaagagtttactattttattcttgctccaaaatggcatcaacagcgatggggtgctttcgggggactattgcacagaatttctgcaacaaaggggcaggctccaggaaatgaaacgggagctctcctcccagctacacaccccctaatcaaacaagcagctttatgacatgcgcaaacggagcagaagtctaagtgacttcggcagaactagcttccccaggatttcctgtccaaaatcagagtgtggagatccgtacttaactggttacaaatcatcttagtaagcagagctgccccgcccccatgtttttgtttaaaaaaaaaaaaaaagaacatacctatcatttgcacattctctctggacttcatttgttccctttcttttcgttgaataggtagaaaattaaacaaacaaacagaaaaaccttcctccgtctatttgctcagtgtgtcatttccctgtgaggttatttacaggtttctttagccttttttcctctcctgcctggtaattacttactgaaagaaatctgctccttcagggcaagctcttccttttaacccctttagctcactcttccttggaggctagcaaggagtgcgcggctctgcagtgacggggaacccacctagagggcccccttgacgccagcatatcccctgtcaggcagcagtctgcagctgagcgagcgggctactgcagagttaatgtacagtaccagggagcctgcaagtgtcctgctcagagctggggcggcacagcccagggcagacaaggcggctgcgaggataccaaaggttctgccggaaattcggtgtggggggactcctgttgccactgtgtttcaaaagcatgcaaggtctgtatagcctgggcatgaaaatcttgcggatgtcagagcaccagagtaaatgacatctaattgggaactgaattggggtggtaaagacaacagagagacaagaaagccagccgagtaagaaattcttagacaacgtctgccttgcagctgtgaaattcattttctttccaaggcaaaaaaaaaaaaaaaaaaaatattaaaagctcacacacggttttgatagaggggattctgcagtgagagaatcgatagcttagtcattttacttaaagagagcagacagccttattgtggggttaggcggcagatgaatttcatcaccacagcgccttctgaagtcatgatgggagccagcaccaatcctgtcctgcaaagcagaaattactcattgccttcctacttcggcattcgaaaccagcaattctgagatcgggagaagaagttgccttgcgctatacatggtttctagtccctctgcccaggtctttgtcggacacgtctcagcctcagacagtagcactgcgttaaagtgaccacacaggaatatgttcctaagaaagaagaaaaagcagtattcatccctaaaggacagcatggcacagcgacctgaagttttccatttccctcctaacacttctttaacaaggataacaagaaactgtcttttgactcctttttgtccacattccatagtcctttctatgaagatgcattaattcatactcaagacacttggatctcaccaggacaatactcgccatcatttaggagtagagactggactggttctattagtgtgttcactggtaggagctacatggatggactcatacctgcaatactctgtgatgtttcgttctccaaatcctggaagggcttttgtttttgctgtttgtgttcttttttgggggggtgatttttttggggggtgaaattcattacttgttgcaataattatccatgatcgatgctcaaaccagagtgttgggattcatctgtgaaaatcactacatgcaacataggagacgaggaaaatattaatgacggaagagctgcgaacatgatgcatgtgaataccttccctttcagaaggcattcctggatatggtaagtaatcaataccttccagtctggaaactcagaattctaaaaccccatggcaacaagcagagcaaggtctgtcttgagtgctcagtataaagccaagaagaccatttgagaaagtaacgattatgcaattaaatttttcttgttgctacaaagcatcccaaataagaaagcataggatgttcacaatagctaatagttcataaacaaaaatagacaacctacctagtaaggaacagaaatggtaggactggaaatctgctttgtctatattattattgttgttgttgttgttatttgaaaatgctctagaaaagggcatacatggatttctgataccaaatatcaattggcctgcatttccatagaaggttaagggaaactttgaatgctgactcgataaaaaacaaacaaacaaacaaccgtaatatctgacctgctcatatttaagaatgctttagttatttgagggtagtccttctgggctgaaccaatagaattctgatagattgctcacacatgaatcatggagtggaccaactttacggaacttgcttagttcttggatgtgtggtcaggtattaaggttcaattcaatgattcaatgcatggagctctccagacgtgcaccatcccatcccgtttcttattggcatctgtgactgagtgtgaaagagctcactgctgaggccattacaaggacaaaggtgcttattttgaaagttgcttgtttttgtggtacctccgagggggcgtggattcaatttcttacagcagaaactttgtgatttatgataaaagcacattacaaggccttttgtctcccaacatacacatgaggtgctgcctctattgggcctgattttcaaaatatatttcctatgtaaacattttgaccagactcaggataagtaatagatatataaacacagatttcgtaggggtccatagctgcttttgtgaccaaccatctcattgtctaagacaccagcaaaatcacctactgggttgttacagatgttctggtttccagttagaaatcacttgcagtgaatgtgggggtagaggactcttctgttacccttgacaggtgcctgttttgttacaactctagagtcatgcacagtcagggctgtggcgtatctcccttctctgatgaccacagtctctgttcccaagctctgatgtctatgaaagaggcagaatagcatgtctgtaggcctcaggggcccacttccaactgcatcaccagtgttcccgactcaggagggctttggtgcctgtgcctcccttcccttgttggtgagggccgtctgtcagcataaggatctagttgttcttacagaaaatgcacatcaggagcccttaattctaagattaaaagtcctggaagtagtccttgctacatagtatgcatctctccattttcttctagtattacagctctatggttaaggccatacctcttaacttttgctttaagtaaagcaaaggttattttccctttaaaggattaacattctcatttccagaagaaagagtactttgctacaaaacaacagcttctgttttagctaagtcctattgcttgagtccatttgttcatgttgcaatagccaggatatctgtcctctttgaacacatagtagtgtaatcacctttgatttttcattaacctcacctctacttctgactgaaaagaaatgagctgttcaactctgcagtttggggagaaaatgcaaatttgcttattcatgcttctgtcgttctatgaaaaaaaaaatgcattcaaaagaggtatggagaagttgagagttctgaatggtttcttttgtgcctggagctaggtaacccttcatctatttcacctcacgctgtgccaatttgttattgttgtgaacaaactgagccagtgtggataccatgctctctatggctattttcccctcggctccttaaaaggcttcgatattgagacatttcactcaaaggaggaaggtggtggtttttttccaggtgacccatttagtgtggggttgattctcacctcccccagttgttgttgctttcctgcaagataactgtactttccagcactgcagtaaacaagtcttggtgtttgacaggaatcattcattccctttgctcaagagcccctcttggatccgtctccaggctcttcagtcttcttgtttcaaaagaaaaagatttaggaagacactgtctttcttcatcttcacatgcccctctgtttctttgtggaaggacagatcagaagatggcaacagaccaatggctgtgaacaacaagcattttaaaggagccatgggctttgatttcagaaaccctagctctggtctaggatagcgctaagccctttggataggcagggtagagagaaagagagagagagagacgtggtctagcatttttctcttttgttttatgagaggccaggaagaaactgatgtggagcaggtctagagaagtcttccgaagtttctcgggatcactatccaaatcgaaattctcattatcctttccttagcctggcatgttgattatcatgcagtgctatgacgaactcactgtttcttggttacaagttaaagttaataagtggttggaatagttggcttaatagaacactccccttgggtgctggtaggatagtgtgaggaatgtgtctctcttgtttgaagctacattcgaaatattcgctggaggattttattacaaaggtgtctttccattacacattttagcctttttactgcctagctaagcaaagataagggttctcctgacagaataaacaagcactctatgccttcgtgttttctcctgtcaagttatgagaatacaatggtagcctggcaattcagaaatgggtcttccatggtcaaagaaggaatacacaggtcagctttctaggaatttaagttccacccagcagcaattaagaagactcctgagaagcctcaatatactctgatgttgagttacatgacagagtctatcaagaagggtaaatactaacatgggtttgtagtttttacatacacacatatatacacacacacatacatgatgaactttgcataatatgatttgtgagaaatgtaagattttataaatctgtacaagatgcataaagttgtgttgaatgcaatgaagacaggtagtttcaaagtttaggagggcattctatttgaatttctttgtactccctttggaatgggctcaactgacttggagaatggggacttacagtagtcaacaaactctgttgaaaaaggttttggactagtaattgtggataatgattaattatttacttatttcattttctaaggaccagatgtttaagtgctttgtaataaactgctgtggtgatgctgacagctcatctctattaagaggtgaaatggggtgattataaccccttaaatcaatattgagcctgtttttcctttgaggctcctgcacttcttttgttgggcaatatgctcccaagtatcagctcccaaaggctgcagtctagcagacagagttgggttataactcgatagtccaaatatgcgacttatgagctagctcatttcatttttttttgattgctatattttcttcatagaatggtgcaaagtataaatgaccatgtaatagtgtaatttgcatatgttcaaaattacacagtattttaaacaattaatccaatgaatgaacatttgaagaaagacaaatggcttgctgtttcacaaagggaaagtatttctctctggccactttttgtctgaacttttaaattgaaactacagaaacaaaacctagaagtaacgtgtacagacagagatccgttttgaacagtaaatgctactgatgtatgcacagaccgtattacgtcttttatagaacagcagtatcattctcagtctggtaagcaaaattcagtccgtatctgcgcactttctacggcagttgcacagcagctgaccttcttacagtactttctcttcctctttgtaacagctcttctcagaagaccagactcaaagcttgggtctagatcctggtaggaccaaaaagtctatttgtaaacactggataataaacttatggctgataattatgagagttcttcttgttcatccatcaatcaagcacagttgtaaatccaggccattgtaggcagaaggtcaggcttagactaaggttgtttttaattaggagaacttctgattttattaaatataccttatttgcctcttggctttctattttaatgtcttttattgtctctagtgataggattcttgaattctaagtgataccttagaacttataagtgaaaattaaattcgattacgaatattatgattgagaaggaaatttgcaactagaaatcctagtgtgtgcccacaatgtacgcaaattaagctttagttttttaggtctctctcagattgttaaaattatgcattctcaactactgactgtggaaacaaaaggagagaaagaacgaaagaaaaaagaaagaaacaaaaaggaaaacagaaaaccataagccaataatgtgggctatctcatgtctgtcacgtgcttcactacccaccctgctctttcagctacggctattgaattgctactttaatgctgacgtcttcagcagagagaaaatgtcttcaactctggggtgggggaaagggatgtggttcagagtgctaaaaacgaaagaataactaataggaaagtaacaatgattttctcatttgccagagatttaattttccttttgtctgttttagccccttactcactttctatctttctttactcatatcacacaaaattcgatggtgtctaacttcactccaatcttttaggcaatagttcaaaaatccttctaagccataagttaactagagtggtctgataatcacttgataggctattagattgtgtctcctatggtttgagaattatcaccctataaacatagcaaagacaacaggttagggatagtgtcttataaaatttgtactgcatatatacatggatacatgtgtatctctctgtctctctctgtgtatgtatatatatatatatatatatatatgtgtgtgtgtgtgtgtgtgtgtgtgtgtgtgtgtatgtaaggttgtatgtttgtatgtatgtattagggttgaaagatgaataacctggattatacatacaggctatataagacatgacaactcccaagtatgtatcagagggcaacaacactgaccaagctctcatgtccatgcccagtgggttcataatagcaacatcatgtatggtatatctgtgtttgggggaacagtgaatgctaaattgtacctgtggagactgtctcttatcttttcaatatctctctactttatggtttgagacacagtctctccctgaacctagaacttgtggtttcagctaggctggctaacaagtgagttgtctgtcttcccagcccccgaccagtaccaaggttacagaaatatacataccatcatgtctggcctttacgtgggcactgggaattctgaactctggtccttacatgtggacagtaagcacttgatccattgaaccatctcactagtcaacagtggccttctgttttcactgtcttgactcactctttacagaatggaatgctcagagcctaagggactttctcaaatgtcatgctttctcaaggtgacattctgctgacacatgaagccggtctactctaggtctggccttatgtccaagctcagtctccctttaacaaaccgtattggtttttgtttgtaaaatgtgcctccataatgtgtccatgggccttctagaaaacagattaacaaaataccaggaaaaaaatcattagcaagttgcataagtatgccagacagctgagaatgtgagtggcctttccttgaaacagcattcgttcatgttggcactatgacctgcacttcctctacatcagcaactttctctgttttctcagaatgaataatttttgcaaggaatttgccatgaaccgtgttcctgaaccatgctcacccatggggttctttggggattagaagaaagtggctctctgggcagatgtattaggatagttgccacattttaggctgacaaagaagagctacaactgcaggacatgctaaatgtgcaaagtgaagtgccctctatactaggcacaaaagcagtcagcagagcatggaaggtctgctcaatctactatatttttaggtgtactatttagtcatgtgcaaactagccacagaactgtattataagctctacttggtgactgacaaatgaaatatttctgaccacgtcttgctgatcatataagttttggcatttgctgctaacgttgctgctcgccaaagtgatcaaccaatgatgggattttacattttataatgcccataggcaaagagcattagcactatctgaagtgagatctgatgctggataagatcatttgtagtgagttatattggcataggagcaacatactgattcctctaagcataaagtgttcccgaataaataccataagaatcctgtcttggagagagccgtaagtctttacggcaactatagaaacatataattatagtacagtacagagcagataactcagagattcagagatatacaaggcatcatgacatacaaaggaagactcaagttaattgccttaacccaaatacctaaagaagtgcaggaacaaaagaccattatacatacatatatatattacacacacacacatatgatatgtgtgtgtgtgtgtgcgtgtgtgtgtgtgtgtgtgtgtgtgtgtgtgtgtgtgtcctgaatggtttaagaattaccagttgctgaaaacaatttggagagtggattgagggaatgtctcaaggaaatatttattttcaatcgatcagtcagtcaatcaatctatcaagcaaaccttacaactagataacttggagaaaatgtcttcattgacagttttaagcagacagtgtgggaggggaagtagagggcaggacagggagggtaccagggaggaaaagccagttgctaatgtagagtcattcccaaaggaagaatcctgatgtggatctggaaacctagtgaggaacacagtgcctctaagagaggagggaggctagggagacagatgtagataatgtatgaattacattgatgagagtcttgagatacttagggaatttggtctagttatttctgtttcctatgagatatgtaattcaaagaaaaaaaatcatatctcagcagggaacatggcttagttaggcaaacagggtgcttagtcaggccatgaaacatgttcaagggtgtcaagcaaactgaaaataggacacagatgctgaaaggagatatcaagtcattaaaaggtgtttttgtctgcttttaaacttactgactcgcacaatatgacaccaggagatggcacagaggtctgatggacgtgctgcagttcctaattactaaatcgtgaattgttttatgatcaaattaagttgcttttatgatattttcctgtcaaataatggtttagggaattgcaaagcatgcagagtctctgttgttgctgtctgtctggtattggtagaaagtgtcttatgaatatattcattagagtgaagtcccaggttggagacctgattttggaaaagtgagatccctcgtgctgcctggaaataactcttgtgtgacaaacagaatctgtaagatgcttgctttgacttttgtcttcagacaataaaatacattgtgggaattgagtttaaaagtgaaacaaaaaaaaatccttagctcttctcagttttaataggaaattttctgcaggttttgttcaaatgtcacacttccatatatatggcctgattttaccaagattcttcaaaactctatgaagtttatttgaaagtatcactcttccctgggaagtggactcactgaaaataatgaagcacactctgactgacttcagctggtctaatctagtttaaatatttattaatgtaaattctcctttatgtttctatgatgctctagagaaatgatgactataagacattaatagatattatttaatggttttatggttccatagaccatgatcatactttctaacagattttagagtccccccctttagttgtccttcttccttttttccttcattctcccgttctctccctccttatgacactgaggttggaacccagagtcttacactaggcaattgcaaatgatatgtatgctgtgctccatgtacagatattccttagtattatagaatatctggaatcaccattactctctctggggctgttgtgtgatatttcagccatggttctggaacttagtataatgaactgagtggtcctgatcacttataagggaacttcaagtttttctcttctttgagtttctacatttttattttctaaatctgaaagtgaaaaggttgattattatgaaactggaaagaatcagtggcccatcccttagatacatgtactcatttctctcttcttacaatgtgactgttcctccattcaaggtgaacagagaagtgatacattgaccagaaaattgtttagggattgagttctgattattttcttttaaaaattacacatatttattatgtaggaacatatgcatatcatcattcacatctggaggtcagaggacatcttgaaggatttggtataaaagtaattttttatttgccagatgtaattgtcctcttagaggcttactgctgaataagctcactctttccagatctttctgaattctggctggctgtttcaactccactgttcttgcccaaacccctctccaagctgactgattcaaccctgcttctcttgacttctgacttaattgctctgcctggcctcatactaacttcaacaatatgttctaatcttctggctccttctcattctccagctcactctgtcttcacctgaagcctatctctgtaaaactgtcccagtaatcctacctctgccccagtgtgccatctgtctattctagtgagagttgcatatcacatctcagattcattctgtcaaatctttctctgattcatcattttgtctgcccctcaattagacagcactttcaaacatggttactttcttgtaaaagctaaccttacttttattgtttgggattaaattgtttgggattaaaggacatatctgaatttcagccagatcatagtgtaatccagaacatgtctgcagtccagctggatcacataaacctagaaggtctttggatgtgattccttgccagagcagccttgttgctggattatagttcctctacgatttgactatctctttctcctatttgggtccagagaatcaaactcaggttgcaaatgcctttatcttctgagccttctcattagcatgaagttctcatgcttttctttgtatttagctttccctgtagacaattcctagcctctgctgtagatagtctgcttaattcatgcttcacatactctatcttaaacaagagcttttttcatcagtaagacaacaaagttatgcccgtaagtgctgacatccacaataagaggtaaaaacatccagtgtagaattgatgcatatatatcttacaaagactgttttagatcgcaagtaattccagaatcgtgtccctagaatttatggttgtcatgattaatttcaacttccatgagaaaggttgtgtgtttggataggcaaaatttttctatattaaaaaaatggcactttgagcttaaataattctctcaaatcttaacttctaacactagagagaatttttctgagtttccatgttcagctcttcctctgaatggtgcttaacctgagagccctccaagaaactttcttcaaaactaattggcacttcattcctaatcattcagtgactgttcttttctatttatgtatatgtctatatatgcatgtatgcttcatctttctgctgagactaaaggcttaaaattagccttgcagctagctcagttatgtctgtgcctgcattcatgacactgatattgtatttcagttcatttttatcataacacatgctcataactctttacatacatgcctgcactgtccaacaaaaatcaagaaaatatttttgtaatatagtctacttatcaattttataatcttaattccttcatctttttcaacacatgtatctacatttgagctttttaattgaaatttttgagattataatacacttctgttattacctctctctgtctgcatccccaccaacactgagcaagtacacctgtttgctccacatcttctctagcccttgctgctactaatgcgaacaatatgtttttaaataactgaagctctcttctagataaaactgtcatgacatattgatgaggaaatttacatgaccattgtattaagaaggaataaagaagctaaagtccaactggtggccaactttgtgccctgatacctcctctccttgcaaagctagctccttgagtgggactctatgttatctgaagtcattctcctactgctcaatgaaccttgtattagaatatatttctgtgcactaattttctgtcctagcatctacctgctttatttgcttactctgaattctaagttgagtcaagccttccttctcttctcttcaaaccttttggatttcttatatcacagcttgcttttctacagaactttgttctttgcattgaaaggcaggtcacattgcagctggaatcatcatggtcccagacaacctgattcaaatcaggaaaagttacttaggttcttaggcaccgccatctgcagaatggaggctgagtaatcattattacttcttgactaccataaggatgaacgttctcatccattgttcttggaactatggtaggtggatgtcaaaatggcatcactctgaagctcagcgtaagctaaggactttagtatggatggcttacttggtgggcatgtttagggaatagcagctgggaaatgttgcagctaggcaggaaagaaaataaagttagtatagggtatgtttatggtcagataactgagatagatagccaacgtcaatgttgttaagattgttgaataaaatcttgcttcaggtttgtctcacatgttggatgggaaaaccagaacattgattccctgactcctgatcttccttcattcctggcagagccaggctgatttacatgcacgtgaggtctgaggtgcagcactacatgtacttcaactagaacaccatgaatatgtgacctctgaggggagatggtcacagctgcagaactgtcaccataatttcccaggacctactgcattttatttcctttgaccttggatagctcagttttctaaattttcattaacacagaaagtctgtacctctcagtgtgagagtatcagctgcctggcaaggttttctagtggtcacattcatcatggataaacaaaacatccatgtcttatataccccctcatccttttctcataattagctatgctatctgctgcaagcactgtgaaatagtgagaggcagcaatgtgctggctgtcgaagtagaaaactaggagtgggttcttgtgctttcacttataaaacacacatcctctggtagaagcataactcacttccatttggtttttttttttcctgtttttttgttttttccccacatagaaaacatggcaggacattctacttccctattgtactgtcatgataaaatgaggcatggtagacagaagtctaagtgaagttttcttaagaagcagacaaggtcagggagtctgctagattttccaagcattttcctatttcctttgtatcgtttgacagcctcatacatttatataatatattttagtcggtcccctccaccctgtcctctattctccctcatccactggtgcttatactccccaccagtgcctctgctgctgtttctccttgagttacccactgaccttaataagaggcatttgcccttgcatagatgtaagtgctaattatctgcagctataccacaaaaggatacccactcacctaacagccattaaggaccaatactacgtgtcagagttactttcctattgctataagaagataccatcaccagggcaacttatagaataaagagtttttattgggagcttacaggttcagagggcccatgatcatcatagtgaggaacccagcaggtaggcaggtatggtgctagcacagtaattgagagattatgtcctgacctctgacctacaagcaagaggcagagagagagagagagagagagagagagagagagagagagcgagcgagctaaccaggaatggcatgggtttttgacacttcaaagcccacccctagtgatacaccttctctcataaggccacacctactaatccttcccaaacagttctaccaactggggaccaaatattcaaacacagaattctgtagaggccattctcattcaaagcaccaaattcccttaaggagagtaaagccacctcagaggcctcaccttcatacatgatgaaatgttgatagatctaatcttgtacaggtcttgtgcagataatcacagcagcaccgaagtcatgactgccatggctatgtcctgtctggaagatatcagttttctgtgtgtgtccctaacttctgctcttgcctctttcttcctcctcttctgctacatttctttgattctaatgtaaccaatacctccttagagtttgttatcatatctattttcagtttctcattttgattgtcttacctgtttgggttttttttaatgtcattaaatgttatctcaagaaaaatgttcatatttggtatattgaaatattgagaatttttaaaaaaatatattcttaggttagaccttaaaatacagaaagtgtgccatatttgtttcatttaaaataacaagcatatctattagctaagttgatcatcgaaaacttgaattcctttcacacatcagaatgtgaatctactcttctgaaagaatatcaatagccatcttagacttacaaatttcttggtgagagcagatcttgaaagtcacaatctctttaatcagctccaggctctagaggcatggttccccaagattagagacaatgaacattgacaagaagtgtcaatggggaaggcagttgtgtcctatgtcagaaatatttgcaagaatttgtgcaagaaaacaaaacaaaccccttgtgtttacaccctaataacaaaggatcatggaagtcaagaatagaggagtgaattggaaggggcagtggcacatgtattttgataaaggaacttttctgtgaccacatcattcaagaaaatgacaccctttctcaacaccactaaatgccagtagtttctttgtgaatggtggagctttctgggtccctccttgacctatgataaactatcactgggtccaatctcatgcaagtcttatagagataaccatggaggcagtgaataattgactttcccccttcttatcatgtggcactgtgtaagagaacagtctcagttttagtcacctaactgaatgaaattcaaaaaccagtctgattgtgtgtgtgtgtgtgtgtgtgtgtgtgtgtgtgtgtgtgtgtgtgtgtgtgtgtgtgtgcatttagagacagggtcttactgtgtaatccttacctgggactcattgtgcagtctgagctgacctctgattcacagagatctacctgcttctgcccatgtgacactcaagaatgccagaagtcagatgaaagtgttctcaaatgttccaaccatatattcaactgatgcactaagtgtgacaattataatgaaagaataattagggagagggttgttgacaaacagaatccttcacatttatgaggctggtaaaataaaccattgcagggatgccacacagctctgttttcatacaaacaatgtttttggtggtaaaacaaaacaaacaaaataggaaccatcagagagctacaaacaacaataacaatgcaaaggagccagaatgccagatgagtccctctccatcaaatagctttacatctagaaaaccaatagctttaaaagcaataacacatctaaaaccatttaaagactatgggcacttggctttgatctttcctcgggacctcttttcattcaacttcactgtgagggtctctctagggtaatcagtattggatcagctttcccaacatcttctttgttcttggatctcagagattttttttttttaaggtttcattcccaagggactagcttttcagtccctgattcttcatgccaatttatcactgttacatgctgtaaagtcgccgagtaccttcttcaggaagcagacagtccatcagccttctgtcctgttcctgaactgaggtcccaggtgcccttcacggatacgttctacatcaacaaaaatgacacatggaggactttatgtctgtcatactgaagactctcttttattcctttcattaccttaaaatttttcaaaccacaaaaaaaaaatattttaaaggggccaggaacttgttttatatgaagtatttattacatgttttagggagagtgtttctcagacatctgcctgaattagtttgcaaaataaagagtatagtttctcttgtaaacagctaaaaatatatctgtgtcatccccagagggctgttatacatgaatactcaatatatatatatacatgtatatatatgataatatataatatatttatttttcctttgaaagtttattcaaaatctggattgatctattagtttgctaaactgtctgcttgattttttttatcctagatttttttatcctatatttttatcctaattctgacctacaaattttatagctgttaattatattacaatctaagccagataaagataagtattgtaagatgagtgttagtcattgtttttaagtctgagtactgccagcgctgctgagttagcgcacatggaagtttgactagtgtatgttacttgatttacttattgttttgtggaagatgtataaggttttcaatacccttaccacagtgtatgtttatgtagacatcaatgtctataataaatatatttaatcgattgtagaattgagagaattgaaacagatgagttgatagtaagactcgaattcactggaaggaaagcccatgcccacattacatcatctttgtcctaggcatatttatataatttataaatattttatagtgctttgtgtaatatccataagcttagaaaaacattatttgacacttgaatcttagtgtgctttgttagctttgcacaacatcctttttttgttgtgcagacagcaataattctcatgagactacatccactttgaaatgtccacaaagtatcaggaggttagatgctgtgattaaagactattctcttcctaccattattctcagtctgattctacagctgtggaactagaacaaagaatgtggggtgggggaggggaggggaggaggagagcatttttttgcttgtttcttttatggcgttttttagacctagagagaggtagaggagaccgagttctgagggtacctctggctgtgtcatccccagagggctgttatacatgaatactcagagccttcaaaagccaacaatgatattcacaaccaaataataataacgtgctaacctcaatcacagtaatcacagataatgcagaatttgtggctgccatttcattttgaaggtaaaatacgagacttgttttgtagatttcatataacatcccggagctgcatcaatagaccttgaataacccgaaataaagaggtaatgagtgcacttgactctgcatcattcagacctttgctggagtatcaggcccacttctgagctgcagacaaaaccaaagaggacacggagagtggcaaagagaggcagcaaaaccatgccttcttctcctatcaagtggttggaagaaggcaatcattagaaagacaaagccatgcagtaatcgagggcctagttcttggaaggggctggttcattgtggccactaatactgaagtctgagtagtagcagcctctgcagtaagcaagattaagccacagatgcagcttcatgtcctagtgatgaggaaaacattttctgtggggagacgtgtacatggctcttctagccaagtaatgattacatgcaaggatcaaaaacatgcatatttggtgtcctagcaatttgccaacatctaccttttttttttcctcctggttttaaagcattcttgttagattgctctttcatctttcctatatttataactaaattctgcctggttgttttcttggagttcttgaaggacagatgtccttagacatcatatctcatataaagtgtttcctgtcatttactaaacttctccttaagtgaatcatgtgttgaatggttcctaaaatttctaatcaggtattcactgataatttatgttatcctctaatgtttttaaggaaatgcaaaacatgtaagcactgaagttaatctggaaggaatataccaggtttttaattttagaaaattaaatatcagtttatattggtatgcttagactttgctgtttaattgtgacagtttaaaatacagttcaagatatttagagctttaagaaaaaaacattatgttagatactttttgatttacagaaggaaaaaaaaaaacgtgatgatagcataggagttttcgtgtactccactcctgttttctactcttttttaattgagaatttcatacgtgcatataaagaagtttatgtaaccaataaataaataccctacaccctcccttatctcctaccggcatttttttctctccacttctgcatggtttgtactctttttaacacacacacacacatgcacacactcatgcacacatgtacactgagcctactaatgcagtttatatatacacgtgggtgtaggaccatctactaaagtatggagagcactaggagcatttccggggccaaatcctttaaaataaaaagttcccttctctatcccatcagccattaatcaccagtagtttctcagctagggttgggacttaaataaatccctctgccctccatgctaggatattggctagcttgttcttctgcagatcttgttaacaccttataggagtatgatgatttttatagttaatatacctatcattactaatttaattaataaattaaattaaccaattaacatattactaactaaaattcataattatctatatagccagcttcgtggaacattcattttctagtctaaagtcccatacagtataccattatttcagttatttatctcatcgttaaaatccgtttttggctagagtagtttctcagatttttttttgttgttgttgtttttaatggtattgaagttttgtaggagtcctattcaaatatttgaagaatataatcaaattgggttttctgtgtgtgtttgagggcaaaagttaacacttccatgagccttattgcttataactgctaatcttaatctgaggtcgaggtagtatgggttaaaataattttttctcctatttctttttattttcatatgtatagaaggcactaagaacaactctgattaagtaccaatgaggtatgtgtcaacccttttaagatatagtttcttagtaaaatatttggagttttctattcaaaatttgcccattttcttttcaacaaaattaatttaattatttatccagttgtttgtgtcaaccagtgagagctcatagatatttattttgaaccttgtttgggaacatactctgataatacttatttattgtgttgctcacactactcctcctctggccttcaggactgtatttatccatctacattgtctacttggtcagttgggaaagccaacactaacagagaagcacaactttgaggatgtctgtgtgggagttgtagagaggatcatccaaaagggaaacccaccctgcacccacagaacactgtgctgtataatttgccatccctgtgggataaaaggggaagtcctgttcaccctggaactcttttgtttactggctgccatgaagtcaacagctaggatccaccaggccctgtctgccatgatggcccaaatccattgaactcatgatctacagtaaagcaattctttttctcagatacatatcacagtaacagaaaactgccccgcacacacactcttttgcctctttacttgtttcaacaagtctggattgatttcattgttattattactgtagtacagttatcttcttttttgtattggttatcctttcttattttccagtatcataagtttcttgaaaatgatcacagatcatattctttgataacccagattcaaccatctcttcaccaagctgtggtttcttttttctggagaataatatgaaaatccaaggttagaataggtatggtctttatatagagatgtcattacttctagtctttcttcactgactgtaggggacaacatgccttcctcctaatacatctgaacagatatatttctgaaatacttatatgtgtaaccagccatatgcacacaatgatgtctgggtgaagagatgggtggaaagaagaatgtaaggatggcacatatggctaggcagatagatcaccataaattcatactaatatttctatctccaatccattactgcattcataatgaattagagtaatttattagtcactctaattcattagatagtttaatcttctattgtttgttacttacaacctagcctacacatgagaaaaccagcatgcataatactgcttttctaataaaattgttcaattccaatggacttgatccatttaccttactgattttgaagtatgtaaataaaagatgtacctttctcccaactttgaaaaagccaaggaatttttctttttttttttaaagatttatttatttactatatgtaagtacactgtagctgccttcagacactccagaagagggcgtcagatttcattacagatgggttgtgagccaccatgtgggttgctgggattggaactcaggaccttcggtagagctttggcactcttaactgctgagccatctcgccagccccggaaattttctttaaaaaaaaaagatttctacattgtaatttcaactaacttacaatggatttcatttcacatatttttctgtgcattaatattattagaataatcaacttgatgctgttcacaaaaggttacaaaatatggaaatttttagatatttctacaactaagtttattagtggcctttatctcgttttctgtcatcatagtcttcatgtgataataattcatttgttagatgaaaatagactagtgtgatgttttgtatctaaatgtctgtagtttttggaagggttacaagccactgcagcttgattgtcttttgctggtagctccagaagacaagtactttataggatgcagctgtagcaattccttgttggctgtacttgcaggtacaagcacacttctgatcaccaagggaaacaggatttggttttagatgttaaaatagctgtttttgagctgccttgatggttaagagcacgatgaagaatagattttatttttcatttaattcaaaataataacccatattttcaatgaatgtcataaggaaaaccatgataaaaaaccttgcacaaaatggttaatatgcctataatttgcatttagtattttgttaagttgaaagtgaacactggagttgcattgtaatatatgaattagaagactccaggacacatttattttgcctttgcttctaacaaaagtatatgcccaagtaatgtgcttgtttgtggtctaagagtttagaaggaaaaaaaggaaaaaaaaattccttttgttgcacagaggagaaatgcaatgggaatatgattcttgagggatgtaaattggcctctggcattgtctttagcggctgcttctccagctttcaccacaccctgacattgtcctcactttcttcaacatggtctctccactcgccattcacttgggcacactgagggtaaaacgggttgtgaaaatctagatattggctgtgaccatatggaatttataatcaaatgggacctgcaagcatttatcaaatgtattctcctctctcatcctccagtcctccccttttatttttctcccttccttctgtgtgtccttcttttcccagtgtcatgggtctagaagttatagcagagccacacccagagtccgtcctcagagcggatgctggacatctgcccgcttcagggggatccagaatgtctttccatggaagggttgtttgagcttcaaattgaaagatcaataagaattaaccagggaaagaacaagaaagagaactgtaagtgatgaacaaaccattgccaaaagagtcagtcctgggggactacatagcaggaagatgaagctcaacagaggcattaggcgatcatgctgaagatccttacagaagtcagaagccagtggctaaccattgcatttccaacgtagagggttcatttcccagacaagcttctaacacttccatttcccagtttacttagaaaaaaaaattccggttaagagcagtatggtttattaatccatctaatgtgcatttgtgtgtgtgtgtatgtgtgtgtgtgtttatatttttatataaaatttgaattttatattttatttttctagtggcatttttaggtttatgacctctgttgctttcttccttcctcctcccctgctctcctggtgatcaccacacacactgtctctatttctctattctgaaatggagaaagtatcccaggatgtggaaagggacagtgtgacagagaatagaagaaatgacagtgggaggtacagccacagccatcccaagcatccgaataagtcttttaagtcatcacttttacatcatcacattcccaccttgcctggaggccgaggagaaactcaagttttattgctctttgttgggcttcagtttttcatctgagatccttggggtgagtctctgtaaacagtctctgggcctctagtgctgcatccaagctcactcctctttctcttccgcagtgcctctctaaggaaaagctgtgtctgtctttagcacattgctcggcatctttatcctttgattcggcaatcttgtatgctgtccattaatctctctctcttcaagggatgtatcttgcagttttttaggtatgtcaccctaccttgttaccagcttttggtatgctgttccttacaaccaaaatgcctcataaacctcatctgtatagcggcaatcgcctcttccttcaagactcacaaaaggaaaaaaaaaaaaaaaaaaagactcgcaaaaggcttgccttcccatgaaggcctttcttactactcctgtatgacctctgaagtctctgttcagcctctgctttagtgtttgttgtggttttctacaaggatgattataggcttaagttttcacaacctgcttcactccaggttcttaaatgctttaacctcccttctagcccaccacccaccagagggagtgggaagggaaggctaatagggcacaaggtgggtgtggacctgtttggaactgtttagaactagtccttttgggtgattccaatctttgttgttaggatgttggcaattcagttcatagagctcagcagcagtagctcagtccattcataaacatcattcacgaatcagcaacagcattcaacccagaagaaacctcaaggctctgccgaatggccagagtgcttgggagcggcaagaaggtacccgaatatcaatcaccacaacttctttttttttttgtattcataatttttttttaacaaaaaccaatacttgagttctttattgttgtttttttttcttcattatattttttaattaggtattttcttcatgtacatttccaatgctaccccaaaagtcccccaatcccccccccactcccctacctctccaacctggcattcccctgtactgaggcatataaagtttgcaagaccaatgagcctctctttccactgatggccaactaggccatcttctgattcatatgcagctagagacacgagctactggggggggggggcggtaatggttagttcatattgttgttccacctatagggttgcagatccctttagctccttggttactttctctagctcctccattgggggccctgtgttccatccaatagctgactgtgagcatccacttctgtgtttgctaggccccagaatagcctcgcaaaagacagctatatcagggtcctttcagccaaatcttgctagtgtgtgcaatggtgtcagcgattggaaactgattatgggatggatccccagatatggcagtctctagatggtccatcctttcatcacagctccaaactttgtctctgtaattccttccatgggtgttttgttcccattcctaagaaggggccaagtgtccacactttgaccttcgttcttcttgagtttcatgcatttagcaaattgtatcttatatcttgggtatcctaagtttctgggctaatatccacttaacagtgagtacatattatatgagttcctttgtgattgggttacctcactcaggatgatgccctccaggtccatccatttgcctaggaatttcataaattcattctttttaatagctgagtagtactccattgtgtaaatgtaccacattttctgtatccattcctctgttgagggacatctgggttctttccagcttctggctattacaaataaggctgctatgaacatagtggagcatgtgtccttcttaccagttggaacatcttctggatatatgcccaggagacgtattgcgggatcctctggtagtactatgtccaattttctgaggaactgccagactgatttccagagtggttgtacaagcttgcaatcccaccaacaatggaggagtgttcctctttctccacatcctcgccagcatctgctgtcacctgagtttttgatcttagccattctggctggtgtgaggtggaacctcagggttgatttgatttgcatttccctgatgatcaaggatgctgaacattttttcaggtgcttctcagccattcagtattcctcaggtgagaattctttgtttagctctgagccccatttttaatggggttatttgattttctggagtccacctttttgagttctttgtatatattggatattagtcccctatctgatttaggataggtgaagatcctttcccaatctgttggtggcctttttgtcctattgacagtgtcttttgtctcacagaagcgttgcaattttatgaggttccatttgtcgattctcgatcttacagcacaagccatggctgttctattcaggaatttttcccctgtgcccatatctttgagggttttccccactttctcctctataagtttcagtgtctctggttttatgtggagttccttgatccacttagatttgaccttagtacaaggagatagaaatggatcaattcgaattcttctacatgataacctccagttgtgccagcaccatttgttgaaaatgctgtcttttttccactagatggttttagctcccttgtcaaagatcaagtgaccatgcgtgtgtgggttcatttctgggtcttcaattctattccattggtctacttgtttgtttctataccagtaccatgcagttttttatcactgttgctctgtagtacagctttaggtcaggcatggtgattccatcagaggttcttttatccttgaggagagttttgctattctaggtttttgttattccagatgaatttgcagattgctctttctaatttgttgaagaattgagctggaattttgataggattgcattgaatctgtagattgcttttggcaagatagtcatttttactatattgatcctgcccatccatgagcatgggagatctttccatcttctgggatctcctttaatttctttcctcagagacttgaagtttttatcatatagatctttcacttccttagttagagtcacgccaaggtattttatattatttgcaccgcaagttctttagtgtgtttctctctacaaagtcttgacaaaggatgatcagcaaagaaggcaaggcaaatgacacagtattgttagcacggcccagcatcagcaaagcccaacaaagaccagcaaagcatgacaaagtgagccaatgccacagcatcgtccattgtctgctgggttatactcatactctttccaaatatcacatgttttctcaagcatctgttctagcaagacatcacatgccccctttccaggcatcttccagaaaaccgtagcacatgtctattctcagcaaagcatgcttccatgtgcctgcctcagcaaaacatcctctcctaagacagtttccagaaaaacatcacatgacacaattgagtctccacagaaaccagaaattcccacttcagatggtacctgatattatttggattttctttaaagaaatgaggtttgagggggcttctttgcaacctcatttgttatacagtctcatagctagattagagcctgccagccacttggcatttgatatatatcttttggataaatgaataagttttcattgttatttacgttttagtcatacatcacatattctctgtgattataaggagaagcacagctttgggccaggtcatcttactacaaatacaacaggcttcacttcttcatgtatctctaacattgttcttatactcgtggatttaaacaaaacactggataaagactgcaggacaactcctttgtgaccctttgtgaccaaccaaggatgttgttctctgtctcgaaaatgcaggccagacacttcctctaacaggtcagcttgagctgacagaagctggagttcagacatttacaagttcagaactttcacaagctttttgtctcatccagattgctcttcccatctctccccaaatagataaataacaaaaacatgaagtttttaccttgtgatagtaactatcctcagtctttgacaatgccttttaaatactataggcttttacaggtatggaagctaatgagcaattcactcactcactcactcactcactcactcactcactcaccactcaggttctcatttgtggtgtgtggcagagctcagatttaaatccagagtctttttgtagaggaagctcatgcatgcattcttccttcatattgctatgtccccctttcttcatgcccagcctaactctctctgtcttatattctctgaccaggtgatagattccttttaacaaccacggatttcttggccttcatttggcattcatccttagatatgttcctatttcatgtatgtaattggttgttccttttggaagccaagactgagggatttctgctttttgatctcgtctctgaggagggtagactgtggtcaagagccaggctgtggagttgggcttttgatctttctattctggtttttttctttagtagctgcattgacttggtcgagtttttttttctgtgccttcttgtttcatctgtacaatagagtagccgaaaatactacctcagaaggcagctgaggagattgaatgaggtaatgtccaaaatgtacttataaccatgtctggtacaaaatgaccatccagtaaacatcacttattctttcatagcctgaagggtctttccacccacatgatgttccttagtctcagctgaatggctgttatcattttgtgggccaaaaaaaaatgcagggaatcacggtcttgcttgagagttatattaactggcatgggcttgctttccatttctcctgctgttccactcctgggtaactgaaatgttgggaaacctttttccactctgatttctttgaggccgaaatccctctggggttgttggttagtgcgttgcagggtaacccatcttttctgtcctcgggcctgctgagatcatctgctgagtgacatgtgtaacgcctgttgtcgccccacccaaaccctctgcctcaaagaccaggctatacccagagggtttgagctaacttggaaccttgtggcaacacagtttgagatcagcaaactaatggctgctttccccatacttagaagctgaagaaagtatgtgtgaatatttaccaatagtcaccactgagaaggaagcaagaagcccccctagcttcgtcaacattattgattgtgcaaagtggctaagccatgtataaaatatcacacaatgatatacccagccatactgagaatttaactctgttgagacatagttaccatatgagaaagtgagatatgggttttcttgctctagtactgagaaaatagaaaataagatactgtcctagggggctgacaacactaatttaatgctacagttctgatttttttaaatattgctgtttttctaacgctaaaaattaagaaattctagttagattttaattctaactagaaacattcattctgaaatatacatgtttaaataatggtgagtgactgaaaagaaacacagctttggtttattttttaaaaactggctattactctaatggttactaaccctgcggcttatttggaaatgggttcctatccaccacatcttcatttgtctcctaattttcatgtaatttgaaaaggttaggtaactttccctagggaacatcctaggcacctcccagaggactggctacagtgctctgattttacaggcaaatttcacgtagtcacctcaggcgatacttccttcacagctcttgttttgaatgcaccgtgtttgtgtgttgtgtggatatggactttccctcctctgagatccactccatgtaaaactttcaataattgattatgattttataagtgggcacacctatatcccctaaagaaatagaagcagtcattaatagtctcccgaccaaaaaaagccctggaccagatgggtttagtgcagagttctatcagaccttcaaagaagatctaattccagttctgcacaaactattccacaaaatagaagcagaaggtactctactcaattcattctatgaagccacaattactctgatacctaaaccacagaaagacccaacaaagatagaaaacttcagaccaatttcccttatgaatatcgatgcaaaaatactcaataaaattctcgctaaccaaatccaagaacacatcaaaacaatcatccatcctgaccaagtaggtttcattccagggatgcagggctggtttaatatatggaaatccatcaacataattcattatataaacaaactcaaagacaaaaaccacatgatcatctccttagatgtggaaaaagcatttgacaaaatccaacacccattcatgataaaagtcttggaaagataaggaattcaaggcccatacctaaacatgataaaagcaatctacagcaaaccagtagccaacatcaaagtaaatggtgagaagctggaagcaatcccactaaaatcagggactagacaaggctgtccactttctccctacccattcaacattgtacttgaagtcctagccagagcaattcgacaacaaaaggagatcaaggggatacaaattggaaaggaagaagtcaaaatatcactatttgcagatgatatgatagtatatataaatgaccctaaaaatccaccagagaacttctaaacctgataaacagcttcagtgaagtagctggatataaaattaactcaaacaagtcaatggcctttctgtacacaaaggataaacaggctgagagagaaattagggaaacaacacccttctcaatagtcacaaataatgtaaaatataccttggtgtgactctaactaaggaagtgaaagatcagtatgataagaacttcaagtctctgaagaaagaaattaaagaagatctcagaagatggaaagatctcccatgctcatggattggcagaatctatatagtaaaaatggctatcttgccaaaagcaatctacagattcaatgcaatccccatcaaaattccaactcaattcttcaacgaattagaaagggcaatctgcaaattcatctggaataacaaaaaacctaggatagcaaactttcattctgaaagcagtatgcaatcttggcaggaaaaggctgtaaaacacacccaacatatgacccctcaatgaattcactcatttaagaagtagactttttagatgtgttcctacacaggctagcttctgacttgctttccattcccccacattattcctaaacagcaattagagaaaaaaaaaaaaacagagatgggaggtaggcaacgagcaagccacagccaggaggtgcagagaataaaatggccaaccacacagaggtgtttgctcttgagttaacatgtttattattcttaagatgttgtaatattgatccatgtctaaaaactgaagaaataaataaacaaaagctgtgttaatgtcagttccaaagtctggaatacatgcaggtaagcaaccccagaagaaacataactgtccgaattgaacatatctgaaattgtaaatcagagctcttggcttgttaatctaagtccatcctgacttcatgggtagctctattagtgggagtaggtagtgctatgagtacttaacaagttaaatccctgtgtcaatctgggaaagtagtggttcttaaaccttctaatgctgtagcccatcaatacagttcctcatgatcttgtgacgccctcccccaaccataaaattatttttgttgctacttcataactgtatttttgctactgttacaaatcccaatgtaaatatctgttatgcaggatatttgatgtgcaatggggtcacggcccaccctttgagaacctctgctttagagaatcacagtcctattaaccacatgtacctatagacctcatgatagaagaaaggcatagagttcaaatagtagcctccagattagtcacagtccagaaaatggagttgtgtgtgtgtgtgtggggggggggttgttgttgttgttgttttcaaatcagtgcaagttggttttaccccaggtaccagaagggaaattcttgtgtggcgtcagaaggagaagaaaactggaagtgactgaactgttgaaatgcatgttgcaattttaagtgagggccacagcaatatcttaccctgtcaatatggtcttaaaatattttttttcaaaagtaagttttaaattgacctttccatgtgacattttcccccatgtgtttcataggttgttcctaaccaccccaccccactccccaacattccagtctcttattattcctctagggccttccctaagcctaaggccatttgactttcaggttgcccacctgtctcttactactctcctttctgcttgccatttcccatgagattccaagaacaatgggcacactgttcctggtcgcctgcttgcttttcctgtacttggcactgctggcttcatctgccaagatcacccaaacctgtctagcctcacctgtcgtttctcttggcaatttctctgtatgttgtcccatcccctcattcttcagatctgatcctggctcctcctctaagattcttcagcatcctctacaacctttaagatggttctcaatccattacagtaagctgttcatgcatgtctaccccactaaggatacactaagaacaagaattaaatgtcaactatgacttcaccaaaaaactaacccagaggaagggctcaccatgatcctgttgaattagtgaatgggttgaccacgccttatctacccggttgctcttactcttcggtggagtatgcttttcttactgcttttcaaggaataggtacacagcagtcgactggcctgcagaaataggcttctgatatttttccctgaaacattatagaattactgtatgtaaaaatacagactccctcctgaatcatacctgaggattgttttcatggatttgtcaatcttttatgattcttgagagtatccatgagcatatattaaaccaactgggtaaggtacatgatctaatatacaaggctgcctttgtgcctgagaactctgccaagtaatgtgccacggctttcaccttgagcctattcaagtcttaaagttgcagtgatattgagtaagtgattttttttgggaggataacatgtctccctattttaatataaattatcttcatgagctttgctttaaggaattaaaaatttgtggatgtgggcaacctttaaagaacatgtctcaccctctgtcattgttgataccgtttcctcttttacacatctctgccttgaatgatacagtcttcaagtattaaaaaatgcattttccctggtgtatttatatcaaaatgagaaaatgatataatttcccttgggtagttatatgtcccacttccttcaagcctttacctctcgatgccacaatgttgctgtatatgcattatggatgtatgtgcatgcatgtgcagtgtatgtgctcatgtgatcagaggctaaagagggaattcagggaccctgctccatcactctctgctctactcccttgagacaggctcattttaggaactgatactatgcttctgaacagcaagcccaagcaatccttttgtctctgcccctcatagtactaaggttacaggtatacatgaccatgcccagttcttttgatgtatatgctagaaacttgaactcgggtcctcctgcttgtatgacaatggctcttatcaactgaaccaactcttcagatcccgatgttgcattttctaattatcagtcaagagctctgttcctaattcccagcctcctcctaaacgacaggacatgcctgctacattagtctctattttatttggttgttttaaatataatttgccagcgaatattgtccagtatgtgtcaacccgtccttccatatagaataaatactaagtgcataagaaagggagtttagcgtgttttgttttctgttgtatcctcagcagccagattatcacttagtatatagtagatgagcaataaagatttgcaagaagacaaatggaaaagtggtcaagagccaatctggggcgttggcttagcattactgtgaaaggacatggttcctctgcaaccatgtatattctttcagagccaccaacgttacccagtattaaggagacacccttttgtgttgtgttttcagctgaaaaaggtagacccaggtgttgctgggtccttttcttctgtagactgtcattttgcttggcaatgttgaagggctttctggtttatacttccctcctcatagctgacttcatctgcagatatagcactactggctatgtttagcattgtgtggtttcagtgtttattttctatatttccacattgctattttagcttattctgcaattaaataaaatgccttgttctctcagaataagagcaatgagaaggagagcattgcctgtgctggttagtggaaactgattctagcatcttaggggacctagattagtagatggaagcctacagacagaagcccttctggggaatatttgacaaatcacccttctttgaatatctgacaccatctttagtctgtttgcattttcacaagctctctgacactcaaagatgggaagactagcttctaaagattccagagctcaagaggccaacagggctaggaactaaaacttgccatatgatatcatgggaacaaatgtctccatgtgcaagggctcagatgggggggtcatttaaattgcaaatttatgtaaaaagaagacaatgtggtattttaaatagttattccacagctagaatcatagaaacagtcttacagataaaggtagaaatcacagatgtacaaagttcagttctaaaatagtctatattttaggagagatttagcaaaatgtctctgggtgtctgtttactctgggagaggctagaggtatggggaacaaagagcatgagatcaaagactttctgccagcttaagttcatttatttcaacacactgctctcattctctctgtatttggcaaagcttcatgttaaaaacaatctagaaggcacctcatgagcttttgtttattagaaatctttcaaataaactaaaaatatgactagtaaattgttgtgtgtagatgtgtccccttgtgcctgctgcctgcctcccttccttcctttctttctttcttcctttcttccttccttccttccttctttccttccttccttccttccgtcccttcaccctgttccctccccttctctcattgcatgttccatctttaaaagagaatttgttttatccaataaaatgtacaaatgaaataaagccattttatgaaatgagaaactagacaaagaactgaatgaagaaaaagtagctgtggtgacaataaggaccagcggtctccagtgagttaaggagtggttaaaggactgagctcaggaaaaatggtgctgatactccttcatgaaaaacctggatcctgaggtaaatttggggctatgtgaaagtcactcagtgctctacagccttggatttccactcaagaaggtatacacagaatgtctctttcagagagtgattgcttgattagctgagtgggcaccccaagctccctgagaagagagagagagaaagaatgagcggattgaggtgccaagtcaaatgtgagcattatacactagttcgaaattaaagaaaaattctgcctgggtgggtttagaggacccttgctcaagtgcataggccaggcatagccagagatgtaaagaaatggcctagattttgcatgtgattgtacataaagctgggtttttacattttgtcccagctgtgttttcccatgaagtgtaactcctccacctactacagcaacaaaaaaatgagattatcatagtcatattataatgaagcgctcaccccacataacatatggagacaaggccagggtgcttcatggggatgttcttttataggaatgaagattaggagtctgagaggaagagacattgatttggacaaaattaccatgttgaacctagaaagaagatcattctgtctttgtgaccacacgtcgctgaccttgcttggtaaagtgagatttgcctgcggctgagatggctaggctgttgcacagtgtggctggttatgttttgtccacttgacacgagggtggaccatctggaaggaaacactttggaattcaaaaacatcaccatgccagagacctcatttgtctgagccctaaacaaatgagtggaaggaaatgatcaaacacagctcacagttgcttgaaaatttttcaacaactggagatttcataggacaagggtcgcctttaagaagagcttgacgtgtcactgggggacaatccttgctttgccatttctatacttttctacaaatgcatttccctttgccccaaatgtttcatctttgtattctcctgtcctctggggatgtctagaatagaaacccattagcccagatggctgagcaccctttgctttccatacattttcttcatcaaactaaagtactatgttgaacagagaaataaggccttgtggccccacatggctggtcttccttggtaaagtgactggcctctggcttagatggatatggttgttccagcgtgtgctggttaggtttttgctccctccacacaagatagggccatttgggagtgtggaacgccaattgataaaatgctttcatcagattgacctgtaaacaaatttgtgaggcattatcttgacaaatgattgatatgagagggcctggctcactctaggtggtaccaccctagggcagctggtcctgggttgtttaagaaagctatgaggaaggaacctcctccgtggttactgtttcagtccttgccctgactgcctatcatgatggactatagctataaactatcaaaactgtagaatcctgtttctattcataagaagaacccttccctccccaagttgctcttggtcatggtgttaatcacagtgatagaaacctaactatgacataggtaagttaccaaaggcaatttcaatttgtgttctattgtatttcttccttaggagaaatagcatgaaggataaatgccaattgctctgggaagttatcatagcccctattccaagtgcttttatttatgatgttctaatcttgccctcaatccgaccatgtttcttgataggtgtgtctgaaggcactacgataaagcacttagatttgaaccatctgctgcagctttgaataggtcaactctctgacggtctgtttccttctctataaaatagagtgaggacatgatttttataaggttttgtggaaggacaagatgataacgcggagaagacaacacagtttctgacacataataagcaactaacaaaacttagctgttcttttcataaacaagttgattctgacgtgaaataatggaagagttaaattgcatggttttttaactgtcacttgatagctctatgttctcaggatctgagattcagggttctcatcccatcagagagatagtaaaagtggcccagcaagatgtttgcaaacacagtaaggtgaattaggggtgtcttgcaccaagccttttgccaggttcttgtcatcttcctctctctatttgctggaaacttggggaatgccagagagctgtgagggtcagccaagggaaaagtcaaaattagataggaaagttcagttcctccatatttcatttgccttttctttattaaacagtaatttactacactggccactaaaagtttaactacatagcttcttacactcacttcatctttctcagtggtccacaacagttttaacatgtgtttgagaaatcccactaccctttcattgagatgttgctccaaacactgcattatatttccaagcacatgttctttagatgtcaggcccaaacagatcccctgtgactcaaggtgcaatctgtgaggatggaggtgagctgttgagaaaggtttctgctgtacaccttacaactattcttggatttcagggattgcctttggagtcgcttaggggctggaaagggatggagcctgcttgttctctcacagctagaagtgcagagtcattccttgtgattaggaagcagtcagtaggagtataccccgcttagagagaccctgggtgtgtcttctgggaggtgggaactacttgataaaaggagcatggtctccaacctcttacatttcctgctttctgtttcaagagaaacatctgcaactataatgcaaacatatgttattggctgagcaattctgtggggacagggaaaggggggggggcaagtcaaaaagagaaattcagggaacaagagagtcatgagaatctggagctagtcacccatttctaccaaaatgtgtatttctaattttgatgcaaatttaatacctatttttaaaaacatgttttaaatgaatagacagttaaaatgaaactttatgagaaaaagttttctgagcctttagtgaataatttattaccttaaaagtcctagtttttaaaaagaaactcagctttacaattcatagtaaatactgaatctttcagttaatctattaaaggcattccttcttaaatacagcattgggaacctgaatatggtatttcaaaacatttctgcttagaagacccaagattaattcccaggacacacatctggtgactcacaactgagtgtaactgcagtaccagggaatcctctgcctttggcctctagggacatttgtactcacacgcacaaaccccaatacacaattttttaaaaatgatagcaaataaaattttaagctacaaagaaggattcctgcttatatcaaacatggttggttctataaatgtacgcatggttcaatgcaagagaagttcctctcagaagtcacacattaataagttaaaagaaatcaggagcccacggagatgacacagtagccaagtgtacgtactgcacatgtatgaaaagttaagttcaaattcccagagaccacatgaagccaagcattagcacttaaccttataacccagatactgctgggtagagacaagcagagcatggagctcactggccaccctggcgaaactgagagctctaggttcaataatgtaactatcctgcctcaaaaattacgatggagaataatagaagaaggtgcctaatgttctcagttgacattcaacatgggtgctcctgtgcacatgtcccactcctacatgagtatctaagacacacacacacatatctcacacacacacacacatcacacacacacacacacataccagacacacacaaagcacacataccatacatacacacataccacgcacagacacacaaatacacacatacacacacagcacaccatacatacacacaccaaacacacacacacacacacacacacacataccaaaaacaggaagaagacattaatgcctttaatttaaaggggaggatagacttataaattacagatgccacggtggcatttgaccaaaacttaaaacctaagtcccactcattgtttttctgttaaatgttaaaaggcacactgaaatagcaaaagagaaggatagcatctgtctcaatagctagacacattgttaagtagacatcatggccattaaaaccagcataattataagcactatgatgtaatagaatatattacacagaaggttttgttttttatttggaccagtgtagcagtttgacacataaaaatcagaatgtggatggttttataacaacttgagtattcatttggaagagctgaaggaattagttgtaagataattatgttcaaagtggtgattgggtaagatgaccaactataaaatacatacagaaatttattatcttgttggctaaatattaatatccagttagaaatataacagaagtaaactgcctcccagacaacatccaattctagataccagaacacattgtccctataataatttctgtgaaaatcatttttctaaaggagaaaaaagtaaatcttaaaagacaaatagtccctgcaagttaatctataaaaactaattatagaaaataaaataatgtgtacattagcatcttattgttcattttgacaaattgtttaaaaaatatctaaggaaataaatatgtaagaaagtcaaaataaaattgaaaatctaacaagttttacatagagctgtaaaagtcatcacctgagaatatattttacaaaaaagatcaaatttagaatagtggtattggtgaggaattaggatattgcagagaagaaccatgttttatgtatgtgcatgcatatcacaaaatgtatcccaggagccaggtgtggtggtacacacctttaatcccagcacttgggaggcagaggcaggtggatttctgagtttgaggccagcctggtctacaaggtgagctccaggacagccagggctacacagagaaaccctgtctcaaaaaaccaaaaaaaaatttttttttaaaatgcatcccaggaaaacaaccaaggctgtatgagaatatttaactacatcattgtactttcgtggaggggttggggtgtgaggaaaatgagcccaatattcagaagagagacttagtttaacatacatgcatatgataggtaagtataatatttattatgggagatagttatgtaatgttaagtgaaaattcataaaatgtgagcccaatatttaaagaagaaagagaagttaatgtcagtcatgatggtcgacacctgtaattccagaactcggaaggctgaggaaggaagcctgtttcacgtctacccggccttgttacagcagacacacacaaacatgcaagcatgcatatgtgcacacacacacacacacacacacacacacacacacactcacacacacacacagagaacatatgggaacatgatttcataataaaatatcaatatctgtgcctcagaaatattgtagttaatttctatactcctactaagataacttctagaaagtttcttcatatgaaaaatgaagaaataatagtagattgtttctaaaagacttttaacaaaatgcttcataattccctgagtagtgattattaataacctttggagaattttagaaatctaactttgccattgttaataatagaataaaagtaggctcagcccaaactacactcatatttacttacaatttaagccatggtacctgtgtgtttgtgtgtgtgagagtgtgttgtgtgtgttttttgtgtatgtatatgtacgtgtgtgcattgtgtgtgtgtgtgtgtgtgtgtgtgtgtgtgtgtgtgtgttgcttcgtgtgccacaaatatctcttttgatgtggggtgggatacagtcggtgaaggctgaggtagaattcggtggcctcccccttggatctctcatgctcatcacaggatcatattaatgtgggataagtacgcttcatactggctgtttggaaccctactgaaaattcttggttatggtaaggctctgtaatcacaactcacactgagaagctgtaagagctgtggtgatttgaaataaatcccatcgctaagtagaactttgtctgtgcttgaagaatttgtagaaagtgcctcggctaccataatctgaagaatgtcacccaactcttacttctggctgacagttcacatgcctgcagaattgtaagatgttgtatttcaaatgggttccagtaccttgttgtgatcatgaaatgaaacacacacacacacacacacacacacacacacacacacagagagttttaatttgctatgtattactccacattcacagtggttgcttggaggccatacacaatggtgcagagtggcttttcaaaaatgatccgccttgttcttgcttcacctgccagacgtcatgaacttctaagagggagcatattttatttgcctcacaccaccggaggacttggccggtggccgctgtttgttcaatgctagtgttgacaggtgcttttgcctggggagctcctggggttttgcagagttagtcagcagttcccacagcagccttcatgcctgagagtgcaacgcggattcacaggagctccagcttcccttactctcatttctgtttacccagtgaaacaaaacaaacatgccaggctccctcaaagggctggcagcaagaagtgctagttctatgtcattgggaatttacttcttgtgtaaatagataaattcctgtgagggaaatttgccacacacccaactgagacaagactacattcggctgaggatctgagtcatctcctgtcctcagttctctcctactatgtcttgtccttaatgaaacagaacccaaccactcttcaccccttttctgcatcactattctcaattacttggattggtttcctaaataattagacaatgcgcaacttcatcggttatgtaatcgtcaataatctactacagaacacatagttttaaatggagactgttggtccattgtattcaactacaaatttctggtacgtagcgggcaagcctgaaacacaattacaatgcagcagtctgttggatgaatgaatgaatgaatgaatgaaatttctcagtgatgccagaagactccattcaagtcccttatcaagttcgagggcagccaaatgtaaataagcaagaccaacttgcaatgtaaagagattgctattatgttccttggtgttagaaagatctatgagatgaagaacactggtcagaggttttgcttttattagttgcaagggcagaaaccaagtttaaactgacttcaaaataaaagaagaaaaaaaaaaaaagaagccaagcagatgatgtaacttagaagtttaaagttcattcttatggttgaaaacatgctccaaaccttctcctgaggtgcttagaacagcccttcatccctctttctctctcctccttctgcctcttggacctcttcagaagtccccttgcagaaacacagagagcgaagcacacctgtgctggtctctggatgagcatctgttccccagtgctaagaaatactaacaaagtctcctaaaatcaaagccggttcatttcagctgctcatcatttactttcagttccactccacacactagctaaagctaagaaggagtggggaagtatattgacatgtgcatcccatgagagggaaaacatcaggactaactaactccctggtagagttatcataaaatcacagtatggctggatgggtgtgaagacacacttcgcacccaaatgatgtctagttgtgctgtggtgtgtgagaaaggcatgcttggccttagcttttacaccagcctcctttaactatttgctcactttaacttactaaacccaatacttactcagtaatttgatatacccgggtgcataccaagtataaaactgtgctcaggaattacccccattgaatagctcattcggtgttaaagaaaagaagaaggaaaaaagatcagtgggtgaccaaatctaaatgagaagtttcgttaagtcacaatattctaccatattgccatcttttctttccttctggtcctttcagactttgaaatcactttgaaattgttccagagatgagaagggagatttggactgaaagagacttctctaggaaatcctgtcctcttgtcacccagctagactgcatttggcattcatatcctgcccatgtgtctcacttgggctggttttgggggtaagagagagaaaagaaacacactattaatgtgcttatagtatttcaacttaccgaaaagccgtggtaagcttgcaaagagtaaatagaacatagctcaagtctagctggaacgtttatgggatgtcaaaggcacttggactttgtagctcttttcctcccattaaaaataagatgactgcattgctatagtgatatacagttaacataatctacactagattacattcacttcaaacacttttttaagcccttgaaagtgtcatgggcccttggtgaaacatcattggtgcttttaaaatgctttcttttttatttaaaatcttaaaaaaacatttttttctttaatttcggttatttcatacatatataaaatagaatgtgattatagttacccctcatctctcccacccagatctcccattttccctccaacattcctttccaaacatcatcttttttacttctttgtttttgatgaacccactcaggacagtaagtggcatccatatgtgcatgggtgagagatcatgcagtggaaacctaccagtggccacaccttccttaaggctgattctccctctccagtctcaatttgagggcctggagatcacctacctcatggtgggtgtgctactttgtttttccagacagacttgattaaaatctgaccactctgagtggatatttggtccatccagtcactctcttccccctgtctacggttgatccttctggtttgagtgtgtttttgctactcacattagttgctacagataagcactccaagcactctactgctgcagcaaagcttcgccctaaacccctcaggcttctgcctgcaggttcaccacagagcatctccttttctccatgagttctcatccttgaatgactaacgtcacgagccacggcgacgccacagttgcctttacactgtaaatttgtacaatatggaaaagctagaaatacttaggcagagagcacttagaatttacttaattcatcaaaaatgttggcccactttttctgtaatgcaggtggaagacaatctactattcaggaaaatcaattcttgcttgagttcagtcacaggccctgtgcctgccattgtcactgacttgcagctgggtacttcctaaagccacttatatgtgactttgagagagagagccaagtagaattcataaattttactaatacttatcttctaagaaagtcctggttgagaactgtctaaaatcaagccaggtaataaattttaacacccattcttcttctaagcaccactaataaactgcaactaaatatatatatatatatatatatatatatatgggaggcctatccaagcaaatatttctggatgaaaaatcagccctgccattttctggcttcgcagtgcccatgtggtactgctggcagtgtccagttctgggtacttgctctaggttctgaaaccagaaggataaaggtaccattctttccattaagctgcagtgtggagcgggttcaagagcactctcttagcagctgaaggtgctgtgactagaacaagtctgagtgctaagttatcaaaaggagattccggggtggcgggtggtggttaaccagtgacgtgtgctttggagggggaggggttaaccagtgacgtttgctttggagggggaggggttaaccagtgacatgtgctttgaagggggaggggttaaccagtgacatgtgctttggagggggaggggttaaccagtgacgtgtgctttggagggggaggggttaaccagtgatgtgtgctttagagggggaggggttaaccagtgacgtgtgctttggagggggagaggttaaccagtgacgtgtgctttctctctccaggtctgaatttcatttacattgtatgagagtggatattagtccaaggagattgctgggtttgaagatgagaatgtataaattttatctagcatagaactcagggtgtactgattgcaccagatttcaacactgccacaattctcgtttgttttctgaaagcaaaacaaaaagaataaagaacaatgctattagcctttcaagtgatctctgcatgaaagagataagactatctctaaatatgctagaggtttaataggagaatatatatgaactcgcttagagatggaaacagaggcccctttaactccataacacaaaatatgccaaacaagacaaacaatatgctgctgttcaatattagtggtcaaatctttatgtttccatattcacatgtatgtgacagagggaatcctcacaaagaaaaataaaaagcttcctatttgcagggtcagtttgtataaacaagtgagctggggaaagatatagtttcatacaaagagactgtctctatgttctgcctatgaattactgtcctgggtgtggtaagtaattcttcctcatgatatctaaagataattcactccgtgtatacttgtataataaatatatataattcattcctcatgtatactcctcatgctatctaaagataattcactccatcagcttcctagcagctacttcaccctcaacaatccctacacagagaacttgcaattaacaggttgcaattgcccctactgaccaaccactgattcgccatggtgtcctgttactgtaaggatcgctctccatagctctgaatgtcgttaacagagatggactctttgctttgccttttctcgtctgtgttaccaggagcatagattgcttcttgtcagtaagatgctgactttaatggctaagtcataggaacatggctagaaagtcttcctctgcaacaggcagaaggatggtaggacaggaggacaccagacctttgtctcagctacagaccaagacagctttgcctaaatcaaagcccctttggcctttggcattcctgtagctcgtgctctctgacacgggaagaactagcgtcaatggggtaatttaatccttgagagcctttgatgaatgaagaaatccaggagtttggtgccagttctccattccatgtgcctagtttcctctggtgcagaaggccaagtgacgatggatggttggtcagtctccacatatccactcctgtcactgcggagggatttatggtctgctcgtctcagttttaaagagggtgtggagccttttgatgctccaagtctagagatttttagcactgtgtatttccaggactacagtttgaaaactcatggagcaaacagggagcaaaaaattttacagcaagctgctaatgtcccctcacttggagactacctttcttacctgcctattctatgcataaatagccacagaatcatctgttttgtggccttcattgagttgttactgtctagtggatttttctctttaaaagaagatacaagaagtaggctctgagcaggggaaggaaggtaatgaagggaggggaaaggttatgaaaatgaaaagtcatacacatatgtataaaactattaaacaataagaaaagaaaatgcccagagaagatgtagttacacggaatgaaaggggtgcttgtgtgtaaacttttcctgatgtggaagttcagaaagtccccataatgaaaaggtctgctttgtgggtgggcactcttccacccagacaggcaggaatgtggtgaggcagccagggaacacatgggcttgtggtcaccaatacagtcacctagttagagaaccccacctgggtttgctcatcttttctgaatgaagattgggtactcaacctttttaggcctccccaggattccttttgtatccttacgctgtatttcttttattttcattttttttttcttttctaccatcctcacaaataaacaaaaaacaaaaaagcctgcacatgccatccctttggctgtgagagatgaatgtgaatatagattttatcattggtggggacagtcactatgtccttactttattcttcactttctcccttctaagaatttttttctttcaaataagtattggagcctaaaggaatccactgggacacttgaacaattaacctggactggatgtcctaaaggtgctggctgaaatacagtcataaaactcagcataacccactgtccctttccctcctctgctttggggcacattgattcttgttaccatgacaacacttgggaacacaaggatttatatctctgccactttgtgacgaaagaccgggctggcatgaacccaaattttgcagctggctattaattgaagaaaactctgctctccctccttagtcagacaccatctgattcagcagattccttttgctcccatcccttcatttgtaccagaaaaaaaaaatcataaatacttggctttgcacagggtgggctgtaaatgtgtcaggaacatactgactgatggtagtaatgctttctggggtgttcttgccaattccattttatttctagaagagtttgggcagatcatttagagggccgtcatgttgtctagtaggaggacatactgtagcctccatttggtcttatgtactacaaaatttgtttgcaaagtaatttcaccaaaatttcaaattctctcattagtagggaaggcactgctctcatgagctgattacattctgattgtggtttgatgctaaatacatcttcaagagacattcataatgacatatataccctatgaacccatgaatagtataataatatatgtaacatatacatatgtatatgcaatacatggtacatggaatgccaacagttttgatgggtgagttttataattaaatgagaaaccacttgtcatgaaattatccaggatggtaaaaattgtagaacttttacctaaaatgaaatttcctgaggaaatgaggtggtagaattcttttggaagtattaaaaattagtacatctacttgatcttaactgagtaggccaattctctagttctatcattccaggaaagtgtgttgccataccaagggcctctttgtgcttcctccacctcagttcctatacttactgttcactctgctttctggatgctgaagtattagtcattactatacattgaatcctgaaaatgtcctcgagatgacaaaactatgctatgtcaatgttaaagcttctgttggggattcagtgggacctgactactaggaactgggaaagaaattaaaagaaaaaaaaagcattaggatattggagaagagacccaggaaaactagtttattccagtttatccctgaagacaatacgtgtgaatcactagaggaaatggtatcaaaggtcatgagatagtccaacttgagttacagaagatgcaaagataccacaggcaagaaaacgttgtaggatgaaatagttacgatgtaagtatccaagctaggattgaatgtctgtgcagtgcttctcggggacaaagtgatcaaagggtagaggggcggggtgggtagagaaggtagaatatggcgttcctccagaagaggatctcaccactgtgagctgcttgtgcctgagtctcttacaatggccacctttccagaaggactctttcatgcacgcaggctgagtcagttctgctaagggagatgtagagctgtgtctgtggatacccgggcaaaatggtgcctcgaatttcaataaaccattgatataaaacagcaattgctcttattatatcctctcccttcaaaaatgctgagaaaaaaattcaggccgaagtctattcgtatataaaggggagagcggccagtatttgatgacagtggggtgctttctcataaagaaactagaaatacaatgatcagagtcttatgtttgttggctaagcatgaaaccagggatgtatcttgaaatataattggagatgattcgtaaagttccctgtgtttttgtctggtgatagctctcttgactgatttaaggttagaggctttgtatttttgcaccctaattaattcacttcctctgtagcaatagttttttttttgccactttaatttttttcttttattaaagaatttcatatatctatacaatcaaatatgatagctcctctgctaactcctcccagtttctcacacttcccagtgaactccctcccaacagcatgcatttttttatttttactatttgtttgataagccactaaatagcaatagtttttgttattatttaatttataaactttggtatcatgttacattttatttatttatttatttatttatttatttatttatttatttatggtgcctatgtctgtttttcctaaaacaaaaacaaaaaaaaatgacagtttggcaacaactgttatacaagtaagcctttttcattttctgagaactatttttggttttgtttgtttgtttgtttgtttgttttttaagacagggtttctttgtgtaaacttggctgtcctggaatacactctgtaggccaggcttggctttgaactcacatagatctgcctgcctctgcctcccaagtgctgagatcaaaggcatataccaccaccacccgatatctaagagctattcctaactataggagcaaagagcagtggccaagatagacttccatgcctaaaaaaacagagagtgtgagctggttaccatgctgcacagcggcctgatcctgaagtcttcaaacgccaccactaaggatattcctctctttttacaaacatgtcaagagcctttgctatactctgctaacaccacgagtgatgaacattcacattgccttttaatgagactgacatctgtccatcaggtttaagctccctcgtctccagggcccttcttggctacattttcacctgtttgaagcaccctgatgtaatggtgaggatcacagaaatcctctagactgagagattaaagccaccggtttgtgaaagatgcttgaggctggtgctgcaaagtatcccaggatgccctgagagcgttactgcaagttaaagcaaagaagaggggtgacgtgaaagagctggagatctcctccttgctcctgtagctatgagaattcagaaatgagcagcactggagaggagggactagaacttcatatgagcttatgtgtgggccctaattgtcttgggcctcacaaagggctgcaccaccagcctattagaaaatgactctcattccttctgccagtgtaattgccagtttggcttctgaacaaagacatcaccatccaggcaaaagtatctttgctgtggaaggtcaaactccttaggaaagattttatcctggttttttgtttttgtttttcattttcttttaacttatagagaaaagattttttccatttttattgtatttcattgtttttaaggaaatggtagatccttatataaaattttaacaccaaaaaaacagaggtttagacagtggttgtaactcagattagatagcagtagtaattcaaacatctctaacaagagacaagaggaggagaggcaagagggcaaagcaccattatgaaactacacagacacacaacgagctcctctaccagaagctgtgtatataaagcagagctctagatgagcagcaaggatatcacataggacctagttaaaaatacaaactctctggtcaaactcgctgtaggccaaaggggcagaaatcctgcagctgagcccagaaatcctcatttacaaaagacctgagaagattcctgcatagcttacagcctgagagccactggttccaggatacagaataaatggttctattcccttgggatggatgtgatgctaatgaggaagactagaggatccacacggtaaagacagatgtgtgttagcagccctctgtttcagaggaaactcaagttaggctctttcacctgctttaagatttttctattgtattaagaagcaagcagagaggtgcagtgagctatttatgtaattatgtagaaataatgaagtttgttctggcaaaaaagaagcctatctcatggaaaagccttcagtaatattctgtctagaccaaatattcattttaggggcaaggcacacaaaagaaaattacctccttcatcaagcacgagggaaatgatgttttaattctgcagagaagtaattttgttttcttggagaaacgggcagactgatgttaataattgaatttacttctcaagtataatggtggctactgtggttcttgctaaggttgaaaaaaaatagaggggggaaaatgaagttgagagggctgagaaaatggcttgcctgacaaagccttcgcacacaagcacaaagacccgggttcagatcctggcactcatgtaaaagccatgtgctgtgtgtggtgtatgtctgtatttgccaggacgaaggagcaggattgggcatacaaaggtgcattggccagcagcctagcccaaacaatgtgagatgcccattcagtgaaagatcatttgtcagaaacaataaaaatgtatcaatacgcaattacaataggtagtgtgatcactttctaggtgaaggaggagaaagatgttatgtaggcagtgcctacttctagactccgacacatcaggccagggtaggtattagggaggagacagtgcagcttccctgatgagaagttaaccgggcaaggaaacagagtcaatggcatatgcaaagttctaaactggacttgtcctaacacatggcttccagctggtggattccagggtggggaggaaggggcacagagtctggataaccgcaggagataaggcaggggactttgttccaacaaaaggggaacttcgtggttcaggatttgtttgcaacaaaaagactggatggcagtctgtgctggaataaaggccagtagggacattgtcccagtaagtcagacatgtgattatagcctgaaccagctccagggcactgaaaataaaaagggttagaaatgctatcctgagggtctttaaagacctgctagttcactggattgaagactggggagggagagctaccattcattcattcattcattcattcattcattcattcattcagggcagctggatgcatggaaggctgtgtactagggtaggggagtcaagaaataacaggttttaggaagagctcatctattgccttctcctgagcagtttctgagagccctgatgagctgatcaactggagaggccttagagagctaggagaaagccacactggcctggaactcaaataacctgacactgttctcactgttctctctaaccacaaaaatcaaccccaacacttctcgatgcaggggctaaggccctaggccctcctttctataccnnnnnnnnnnnnnnnnnnnnnnnnnnnnnnnnnnnnnnnnnnnnnnnnnnnnnnnnnnnnnnnnnnnnnnnnnnnnnnnnnnnnnnnnnnnnnnnnnnnnnnnnnnnnnnnnnnnnnnnnnnnnnnncccgcagggaaatggcactactccagatgccagttttagatgctgcatgcaattatatttcaacaacagaggatgccagagaacttggagtataaaagaactcctaattttcactagggatagtttcttgtagaaaaaaatatatttgctgtagatcttttgtttgataaaaataataatagacataaatgaatgctatgatagccagaataaaatagatacccccattttgagaaagaaggactacccaagtctcgatgctggtgctgtatactgcattttgaatagagtattttaattagaatgggattcccttttgtcatattaaggaagaacttaagatgccacatgtttattgaataaaaccggtattaaatgttaaatcttcacagcaagctaaatgcttctcttcctggatatctaacatcctgtatattagatatcctgtaactcagtacagcatgcagggtaggtgttttctgcttggatttgaattaccttagaacaaatccaccttgagcactttcaatatttcttcctttctttttccttatgccttctggtatatatatttttttcttcctctatagtttcattgtcctatgaaatttaaaaataattatatcagtgtgtgggaaaatattccagcactgtatttcaggcattttgatgctcccagagccgtctagttacacatctgtcagccttcccacttgctaagtttcaattaccagagtctttcacaaaactccgtccaaacaatgtgatcctgtcttaggacatcagcttgacggatgtgttcactgtctacaggcatgcgtagcagcttcactgaatataaggcactggaagataagatcctcatagcaattgcaggattttgaggacctgccatttataagtataaagaaaaactaaacctcctccaaacaagggttaatatttatttttattttttgccctttctctctctctctctctgtatatacatacatatataaatatatatatatacatatataaatatatatatacatacatatataaatatatatacttatcttgaaatagtaaagaaaacatattaagaataatctgacacagatagtgcttaggaatgatagctttaaggtctttatggtctacatgttgatgtaggtttatacatgtgaatgtggaaaattaaactatgctagcatgttttccccccaatggtttgtattaagtatttactccctgtaggaaatgttgaaaatgcttgtactaacaataggactcaaaaaagtaccatgcccatgtgttctcatacacgtcacctcatgtggttttaaagatgtggccatgaggtcaatacaggagcatgaccatagatacacaaataggctgaatgaaatgtaaatatcacattgaaaaagcttcacatatttttttaatctactttaaatcacctgaggaacttttaagaaatctgagacccagatcaggtacctgattctatggcactggaatttctgggaagaggaactaagtatttatttgtaatgcctctaacatctcttctactctagagtttaaccaacttcctttatagatattgtgttaggaactatgcctttacgtacatttcctatcagaaataccactttctatcaaccccatcacccccaaccccaatggccatgtaaactagttggctatgtgaggaaggaagatatgcacctattctactctaaacacaaaagtcctgttaagcattcaagaatttgcatgtttacctgtgcaaaataagggtcacatccaaattagaagtagcaaagctctaccctgttttctcattttcctctgcatcacatcaaacatgaccaacccatacctttctctggttgccaccactaccaccactacccctgcttggacttggccttttgttcatctagaaattgtcaaaattttctaaagattcaggttagagcctatgactaagaaactcattggctttccactgcctgcaccttgactcaaacagtgtgagataagtcatcatttgcagggacaccctatgaggcttcatggtgcctgggcatgccgtcctactctaattcatctccaccctccttgtggtacatgccaaggcccttctgttcactgccactgccaatccataaagaatccattacatcctttggagctttgtccttttggctccaccattatttagatcatcattatgtgggtaaaactgtgtttcaaatcactaaaatgaagctacagacaaggataagaatatatatatatatgaaatttctgtatcatatatattgatatataatgtaaacctatcatgaggaaaatatccataatttcagacattcaggaacttttgaaaatacagattatatgagaaagtttttttcctatttggttttctgtttgtttgtttgttttgtttcgtttctaaggatattcctgctggaaaagggtttaatctttgagaaatagatctaagatctatctgaatgatgcgcacaaaacaagccagatttcaactaatatgtgaaaagcgtttcgaaatattacaaaccgctcttattttacacaagtaaattatgtgaaccgttggcaaataaaaaaaaaaatgtaggtttgggcggcagaggaggctctgttctgttttcacacaattcacatgtctagttttcaagataaactgctcacaagatttttggcattacctccctaactggtgacttgcttttatttgtagtttttataagcaaatgtgctttttatccacaccatccgtggtacaagttctgccttcatttgctgatatcatgaccagcttgagggagttataagcacatcgtgtggagctcttactgtcagtgtcccagtgtcccaggtctatctttctgacaagtccccatgccatgtggggctgcttgttggtatctaccctgtgaagagtctctccattagtcattgtgtctattgagtcttcatggcagaaccgtatgcatgtcgactgacaacaaatactttgctgcttgccaagcatcttgatgcttccaaagagccatatatagacatagactcagagaagcgaaccacatctatataaagattgtcttgttgtttggtctagttttagtgtatttaattacatcaatcttggagaaaaagattttctaaacttggcctcacagatttttttttaagacaatggaacatttcatcttaaatcattgggctttgcatttgtcatattattataagcatatgagcttcaggcaaccactgatgtgctgctttaggacattttaataaagttggtgataaaagtagaagggttcattcttgcacaaatattccaaaaacaaacaaacaaacaaacaaacaaaaccaatttagggattagctatagctaggccccaggatcatttgttctatgcatttgatcagttgccattttctataatagtctctgttgcaaaaaggagattctttgttgagtagtgagcgacacactcacttgtaggagcaaggataaatatttataatgcagttaaggattatgctggcttagtgaagtggcagttgtaggatttcctccaggatctctaacctccctagcccttggctcagtttctaatgctggacacaatttccttattgttcagtgacccgtaagcacaattagaaagccgttggttactactaagttctgagtgccactattgtactcttagggttatcatgccatgctggccattgttttaattcatagaagtcataactaatggtttctctaactaataactaataataataactaataactcataactaatggaagcttttggacttctcagggaaaagttttgttacctcagatcctccagttcctatatctgaagcttagcagtagggctttaaccttcaatctgtgtgagaacaccagggtaacaacaatagcctatactattccagaagtctcctgggcaccctgacttatatgtcagaaactcatcagtagcatttgtatgcctggtgttgggagttttgttaatagtatatggcccatgagggaagcattgctagcccagttgataaaatgtcatttaaaccataaatgcatatgtattcacgcagacatatatattatatgtaatttttagtaaatagataataatgtaattcctcatgactttctcagttatctttgtttgtatttgacctttcttactcgttcacgtctgtgttgaccacttaacttgccttgtctttgctatctctctgcttcctattttttccatttcccctccaaatcacttgtagtcattgatttccctctctattgttccttcccaccccatggtaccattttatttccctggcttctacagttactccatgttatatccttacatctgaagatttggagtttggggccacagatgatagaaaggaagcaatatgtgtcattctgggactaggctagcctactccataagctcatgctagttccatccatttaatctgcaaacttcatgatttcagttttctttacagctgaatagtattccatagggcatatgtcccacactatcagtatacgttcactagatgaaggacatttaggttgattctgtctcctagctaatgtgaagtagagcagcaataaagatggaagagcaagtgtctgtggaggtagatattaagtctttgggcataagccatggagtggcatagctgggtcatatggacacttcaggtgcagaccatccggtgatgttgcatgattcattttttaatattatctttaaagggcattaaccataccagaataccaagctagccctcagtactatataatgatttagggaaaagacttgaaatccaaacagttctcatttttaatttcttactaagtaagcaataagccttgtctaaacagcaccattcatcttttcatagctactgaagaagacatggaacactgagatggaatttgactcataccatattttttaaacagactactttaccttagaagttgttataaatcaaagaagttgaaaacattcagatgagtgggtttggaccattggtttagcagcattatcatccaatggcttatagcatcgcaagtatcttggactgcccttgaatctgcaaccttgctgtagtaaattaagcttgcaatgatcttatcatcagagatgaacttgtctatactaaataaccgaaaacaaaagcaggcagttactgcagcccaacagccacaattaatgctggtagtgttgatcctgcaaataatgtgattaaggccaagtcaatgtgtgtgctaagagcattaccggatgtacctgccaggtataaacaaaaacaaaccaacttaaccacaaaataactgcccatttagggttttttctaatttttattgcattgtatattttaattttcaaaagaatggggattcaaattcggtgatctatatcaataaaaagataatagatagatcaaagaaatccccaagtaattattatcattttaacattctgcagtgaaggattgtgggaaataagccctctgttcccagtcaaaatgtgatccatgaaccagcagaaccctagcccctgggagtttcacataaatacagattcttggaccctgacctagacctcctgagacaaaaatctgcattttaacaagctccctggtgagtctttccacattcattgcaagaaataccaagtggaggcaatacctaagaggctcattatgaattttgccatcaagtgtattagatcctaatagcaccatgtgaatccacattattcttaatagactgctctagcatacgctttgaaaagccctttacatcgagggagcttagtggcttttgtctcagtagctagccttggaaggtaggcatctacagttacatttggagaatttttcaaacctttcagtcatatatggcttatatttcaaaagtgtaaattgcccaagcctacttttacaagtgcaatgctttaagtcagctgttggtacactagcgatcagttgaaaggaaggcatactgggaatatagagaagagtatgaacttgaatcagaatgtccaaaggggaaggagacactgttgtctttctgttagatgctaatacaggccatgccctgaccctttaaagcctgtgctcactcacttcaggcagactcacatctttctcctttacggacagctctgtgtgactgtgttaattctgcttttagggaagtagcttctccctccatgatgcctcaaagcatcagcttctccctccatgatgctctgggtatcactgttctcttaaatcttggctcgaaagacacctgaaatgtcactgttcctatgcactgtcaagcttgtcccggatattttccattccttaagctaactactcatatccttgtcaggccctactcacgcttctttagattaccttccctccttccttcctcttcttttttcttctttcttttattttatctttcctttgtttcttggttgtctcaggatggaactcatggcttcagggccctgggcaagtactctaccgtggagaaagtaatccctcacccagagatgagtaaatgaccaaaattctaagtgatctctaactggtgcaggctgtcacagaggctctttccatttcatcctggtccttatccatcagtgaatgtgactttagattccgtggcttcttttgtttccatgcgcggttgccacatcatgacttagggtccagtatctgactaattagatatttttcttcttaccagagggcaaattttctaacgtgcccccattgaaggtcatcttggtagatcggggccattatgttccttttatatcctcattatggtatccatgctattaattctttcccacccagaagtcatcttgtctttagccaagctacaccttttcccagtaagacttgctggtatcattttagtctttcttgagttttatcatattgtgagctttgccacggggtctccatcgatgatttattttcctttgtcattattgcttacgtgtggtcttgatatgtagcccaggatgacctttaattcactaagcaacccccattaccccagcttgatcttgagctttttgtgtcccccatgaccccagctctgagaaggaccacacacatgtgctaccgtgtctggatccatggctgaagtacaaaatgtgcatttgtggtttttccacctgtgtatacatctttgcgtgtcacttagccacaagacctttagattaataagtcctgctgtcaagggtgttcggtgcctttaagtatacagctcaggatggctgatttctgacaacttcaaaaggagaagataagatttggggtatcttgttcaacacaaaggtgcttaagtaatgtcttctagttactgtagtatttgttagctaaacagagactaaaatgaaagtagggacacacaagagaaaacttatttaactttttttctaagtttattttggggggggtgggcttgggtgccatgggtgccacatgtctggcagtgagaggaaacttctagagattttctcctttcttctaccattttcagccagtgaccaaactcaggtcatctgcctccgtgggcaggacgactgagccatctcactagttggagaaggctatcttttaagatgcctttatcattaattcgtctcatcttctatgtgtgcatcagctgagcaccactgattttaaaacaattcagaatctatgactcagaagtagatgactcaccaaaattacagacgaactccttgctacagatgctccttgttaattaaatacccaagacggcagcatcaaaacaggagggattgttatgtagcagagacaaaaccgtaaagcagtttctttctgctggagactccttaactgcttgacgtagcaggattctgacggagtcgtaatgaggcatctttgactttggaacgcaggactgggatggttagaggtgcatttcatggtatctcattaggatctagcactctgagcttcatcccttctggtgtctcaaatgttaaagggatgcatcaatcccaacaaacctttgctttctttcttctttttttttttctttcttcttttttgtttcttacttttcttgggtaattaaaaaaaaggaatgttttatgaaaatagtggtagaaaatggacagtgctttgcagtgtttcaattaacattttacaaaaaaaagtcatttatgagacacacccagttttagaaatgtctgcctttgcttattctctgtagaggtcctgccatgcataaacgcctcgcagttcatattacacaggaggacttcagacgcattaaatattcacatctttgtctgtatattatctggaagataagttcttaaattggtaagacaaaggttgctttgattttacaaacatctctgtgatagtgaaagatggacctggcccaggtgctgcatggcagtaagggctcaaggggttgaggctaaaggagcagcaactgagcttagcctacattacttagactggggaagtgtgaaaaatgagaataaacaaaatatcttccaaacatgcaatggcatcaaaaccaagatagaaaaaataagatgagattaagctgtaaggacagacccctgttgccactcaaaagaactgtcaacttctaatttttccccactttggctctgcagaaaagacaagctagctttctgaaatatggttaatgttataaataaatagatttatgagagcttccccttccctgactttaaaaataaaactgagaagggaaagaaaaattgctgtgaagcacacagctgtgttttaaaccatatcttctcgatttcatgccgtgtatccaaacccccaagccaaggtgagcaaggttcaactgtgagctatcctgtctgcataacaggcactgtgagttcctacagagaaacatctagagacgtgtgggctttagcagaactgtttcaatactgagattggccatcagctcttcattgtctcactgtagtttgtgatgcagcgagttctgtttccttctttagacagcacttaagtggtgttgtgagaaacggctttctcttcaaagtggggagaagtcagttgttctggagcccaaattagcccaagttccgagttaaaatgtggcaacaattttattaggattttatagtaatggaacaaagaaagccttaaatcaggacactttaaatacattggtggaaacatcaggttaggtggtggcttacagcacagtcagggagacctctgtgacagatctaatgaccgtcttagcatttggtctcatggaagctcgtctatgaatacattcaaagctttcacctaatggtcggcaggtgttaggtaagaaggatgtggccgaggagctgctattacagggccttaaatgcagccctgaatgcactgtccttccacaaatgttaaagttgtgttcagttgatcagccttgtaagcaagtcgatgcaagctgtggcttctttctgggaaatacaaatgtttgtgactctaagcttgttctttataaaaggaagcatatatcaatattcaaaatgccagctcattgaagtggatacgcagggttggtggggaggtggggggaggaaagagttcctctggccaagtccctgacttaacatttctaaagccaattacccaatttatatattttacttttagggctgatttaattatcagctcttcagccagggacggaggaaaggctcctgacagatgttctgttttaaggccaaaaagtttctttaaacgatcattcctaggaaccttggaaagtcaatgttgtcctacccctaactgtttctgtcctgggggtcgtgggggggaatccctacacaagctgactaaaatcaaccccctgtaatagtagaacccccatctgtaccatgaggaagttccctggcccaaggctgtgggacccacaggtatttcaagatcatcctgaggacggtaaatatgatatgtaagaagctaaagccccaacacatgataacatgtgtaaagtaagaattgctttcaactttttctgcctctcttaacaagcatatggtttctttaaagtacagcttcagtacactaagggttactctggtgacccaaataatttagttaatgttcagcttaaacatctgacacatacccagaagtcacctggcactgggagatcgcccttcccagctatggggttatcatgtctgtaaagcagttcgcggtggagctgtttgtgtgtggctagcaacagtctctaagtctcgagtttatgggagaacaaagtgcactctgacgccatggcttacatacaagtgtttaccgtgagtcacaatgctcgcttgaagtctgcccctcaaataaacatgccttaaggttaatttcctcacatttcttcataatctgagttcatgaacaaatggagttattattatcacgtatgtgatagccattcaatggattgattcttttgcctcttgagacaatgtcttaccctgtagcacaggctagccctggatacatagcaatgattcaccttctctctcagccttctgcattctggaaccacactcaggagccacagtttctgatttgtttgtttgtttgttttctttacaaaactgaactgatcatcatgtttattttatttgacttctatttgcaacatattacatcttgaagtttgtgaatttgggagatcatgcagtactcaggatcttctgaagccgagtttccatttcttttcatctcaatgaaggctagttcctaactcagtactctgtttcattcaagatgctccttatctggaatataaattaatgttaaaacctttttatcttctcaattcacaacagctaccaccttcatttcttagcactcatcaatagtcaacaaagtttgactggctagcaaatacctaagaccttaaaatcacttacattgtatataattgggggaaggcatgtgcatcaagtttttctgcagcaaagaaatggtaatgccacaggatccaatataagtatacacttatggtctttccacgcacacccacctataagcacacttgtatataggtatacaaacaccatagtcacacacaagtaaaagtatatgtgaagtaaaactatagaagtataactgtccaggtggaaggatgacgtattagggatggcactgggacaggtaactcttccagaattaacctggaagttaagtgatttgggatgtttggtgtatgaaagctgagtccagaaaaaaagagagagggagagagggagagagagagggagagagggaaagagagggagagagggagagagagaaaggatatagagttgagtgcttacccatgcacagcagcaccagggctcttctgtttagctagtggagaactcagagtaaggtgacttgtgttgatacttgaagccgttagtagcctggactctaaatgaaggctagagaaatagtaacttagattagtaaacaaatacagtaacacaataattatttagtgttgtgaacctggattgaaaacaaaacaacactttctgctaaatacagaggggggaaaaaaacctattgactattgtctacctcctgtctcctcactttactaggcttggggtttctctcttatcaagacgagatctgtctggttttatttagactcgatgagccaggtttcctccacatcataccaggagcatgcatctgtaagtgcaggtgtccactctgagcagtcctcctgccctgcccctactcacaggctcactgttctgtcttcctgtcctagtatcatggtctactagcaatagagatttctttttctttttttttaaagatatatttattttatatatatgtgtgtgnnnnnnnnnnnnnnnnnnnntctctaatgggatctgatgccctcttctggtgtgtcaacaacagcatactcatatacattaaacaaacaaacaaacaaacaaacacataaataaatatgtttgtaaaaattctctcacatatccacaaaagatatacagctcagactccatgtctactcacccactgggagtctggctttggggccccagtcctggatcttttctaacgcagaataaggtacttagggtgcaattggaaagaatgtttgtggagcctgagaggctggaaggagcggctttagcagagcaactgcatgcactcctgaaacagaagatgcggaaggatggagaaaagaaaggaggacttgctctctttcctttctctctttctctctttttaaagatttgcttactttatatatatatatatatatatatatatatatatatatatatatatatatatatgaatccactgtagctgtcttcagacacaccagaagagggcatcaaatctcatgagccaccatgtagttgctgggaattgaactcaggacctctggaagagcagtcagtgctctttaaccactgaaccatctctccagccccaagatttctttttcaatagctattttttaaatttatttatatgagtacactatagctatcttcagacacaccagaagagggcatcagatcccattgcagatggttctgatccaccatgtggttgctgggaattgaactcaggacctctggaagagcagtcagtgctctttaaccgctgagccatctctccagccccaatagctatttttttataatttctttagttttagaatatctatagttagctatacttcaccctcctgaggccagcatgtttctttatttcagatggacaaggtccttgtgttaactacttagacttattcattacacacagcttgtattaaatactaatgtgacacgctactccgtctacctgtgccattcattagaataatcactttcaatatgaagtaacctttgaaaatgtaaatataaaattttgggaggtatgtaaaaacaaatatttgtgggctagctcagtggcaagacacttgcctctaagcccgatgacctgaggttagtccacagaatctataggatggacagtgagaaccaattcctgaaagttgtctgggagagaagagatttcttcaagctgtcctctgccctctgtacatgtgtggtggcatgatcccccctgcccggacctataccccacaccctattctaaccaaagtcaataaatacagtaaaaatataagttcttttgtatatgcgaagggaaaatcccatgcatctttaaggcaaaatacatgtacttagatggctgtttataaacaaattttttaaatctcataaaaacagaaaaataaaatattggcattctgtaaatgggtggttgaaatggaaagtcttatgatatccataattagaaacataaagtgaggtcgtcagtctttttagcccctgtgactcgtgttgggtgtttctttgaacaaagattccaggacacttggccccttctccatcatttcaaacatactttcctcttttgctgctcttagttcccatccgttgttataaaacacctttgcctgtgcaccttggatttctctgagcagcatctatatgcaccgtgtggtcttcttctcccaaatgccttcaacgagcctccttgccttggctttccacgtgtcattatcatatcgttcaactccattgctccttttgatcagcttgcaggcactgtgctggccactggcgagctgtgactgtgtacttggtagcaaacagatagggttctatgtaatagcatgcaggcggggagaacggctagcctccacctatagaaagcacagatttccccttctagtgttcgcccctgactcaaccttcaatccctctgcccaccagcttattgcaggcttcccctaacttgctcctgaagatccttgcctgttcctgccctgtggaagttattctgaaaagcaagtaggtcacactgctttgttctctttaaaaaaaaaaaaaagccacatatcagctgcttctatcacttggagtcaagttataactgttcctttgaagcacgtatgtgttttgacctccataccccttgcgagcgccctggttcagacacttcccagtcctcttctctctcttcactctggttctgtgacttttctatgaggacaagcgattccacatcacaacccttgatctccatgttcccgatgcttcagagtctctttctctaccgtccccacatctgcacaactaatccaccctgaccctgggtggctactcctgtgcatccactccctctgaggaccttacacctgctccattccatttctctatttctttagtagtcatcttctgccgacaagaacagatgctctgtgagaacctgagccattgcctgggtcttcattttttgggatccacagaaactaaatagtacctccatatcatagatgctcaataagtatttgtaaaggaaagttataaaaagggaggaagaaaagaggggtagatggttggtgaggaaagccgagggatgttagaaggaagaaacaagacaaaccagggaggaaggaaagcgggtagactcctctgttagtatacgtctctagcaattcttcagaccaccctttctctccgaaaccacacccgttctggccttcagcccagagcctttaaaaggcatcatttttcggcatggactctaaagctgctctattgactttgtgtttattttcagacctaacccaatcctttttatagcaaatgggaatggcttcccgtacatattagtagtataaagtttcttctttaagttaaggtgtaggctaccctactccaggtttaaaaatgtagataataatacttagagaactgggatggcaaaaatcatgacatatgaatatgggggaggaaaaatcaccaactagtgggttactgaccagcattaaaatcctacttttctttaaagtctgtaatccccaagtcagccatgaacccttcgctattgtccacacttgctctttgtttcactgtcgaagatggactgagacttcagccaccatatcacctatcgcttactgtcattcgggctgttcagttcttctgcctttttaaaatccctgtaaggccatggtgtgggtggtcatgtctcaccctagcctcagcaacctctctaatacacagcccaggaccaacacagcagaaatgcacaaacaataactgtttgttattttcatggtcacttattcccaatacagaagatagagtatccctgcatcaaaataacctaagcatgctttatcagtgcatctgtataaccaaagaaaaataacataaaactgacatgctatgttacaaaattaaagtcacttctctcctgctcataaaaggatacatagccaggcctagtggcccatgcctttaatcctagtactcaggaggcagagggaggcagacctctgtgagttcaaggccagcctgatctacaaaacaagttccaggacaaccagggctgttacacacagaaatgctgtcatgaaaaataacaaaaacaacaacaacaacaacaaaaatgtacatttcttactgtggtgagataaccactagggcaaagtcattagttaataggagccaaattccagtgcagcctatttgaatgcttataaattaaaacctgctaaaaagactagcaagtatagaaagtcattgataaagctgttagtcaggcatatttaagggaactgagaagcaactaaaaaaatcactcgttttccagctaatggatttaggttgctggttctctggtaagaactctgcctcgtcgtaaggttagcaatggtgttagcttcatatttttactggaaattttgaaagcacaaaattcaacccaattaggcactggtcaggaggcacacctcacaaacacctatttgaattcccagcacccacatgaagagcttggcatgtattctgtggccagtatccagctagaggcagaaacaggtagatcctaggagcttgctggtcaggcagcctagcttacatggtgagctctgggttcagtgagaaagcttgtcttgagaaataagatgtagggtggtaggggaagacacctaatgtcagtcactgttctccacatgtgcgcctacagaagagcacacagttagagacgtgcacaccacacacacacacacacacacacacacgcagagagagagaaagagacagagacagagaggagacagagattctatcaagggtaaaagctacttagattgcctacaatggccactgagcatgaattattttctgcagcataaaccgctgttatgacatatcagctgtgtgagtaacagtggctagcactccctagttgtgctgtgacccagacactgcctaagcttttgaagtgtctccagtcatgtgattgctatagtctagtgaagaaactctagctctttgaggctgttacttgcccgaggctatctgataaggaaatatcagaactatggggttcacccttgaatgctggcctattacccaccaagcacgaagccaaagaggcaaagctgaacaaggtctccaagaagtgagaaaagtaagggcaaatgtgagtatcagaccttggtaattaagtgagcatgagctgcctgcaatcattgcatttgcgattgtttttataatttttcacaaaacttcaatattcctctttttccaaaaaaaaaaaaaaaagctttcagaacatgtacattttatacaatgttaatattttaatgctaacttggtaagataagatagctttttttttttttataatatagctttatttgtttgcctgttctaagatagggtttctctatgtggtcctggctgtcctagaacttgcttcactaggtgattggttctttgtgagtttcacatcatgcacttcagtcgccttctctcctcagcaccctcacaccctcatatctgccctttgatcttgctacccccactcccacataaaaaaaaaccacgcaaacaaacaaaaaatggaacatagaaaacattgcatcgtggaagctatagtatggcacagtgtgtcccacagtatatctctctgcccacacagcttcacttgcaaatgactgttgctgagtctggtctggctcgagatctgtcttctgtggcatcatcgatattagatcgtccactggttctccccctagttatcccgtttcttccctttgtcatacagatcctgcggctgtggaccagcaggactgactctttctcatgtcttaaccattctcaattaatgcttccagtacccctgcaagaggagaataatagtcaaagccagtttctaagggctagaggcatgtgcatacaaatcctgtatatttttatgttgctcacatactaaggaaaagctttaaactttgctgatgagcatttcttccttccttccttccttccttcnnnnnnnnnnnnnnnnnnnntccctccctccctccctccctccctccgttctttctttctttctttctttctttctttctttctttctttctttctttctttctttctttctttctctctgttgatggggaggagggagatctcgtgtatcgcaggctagtctacagtgtgtcgtaaccaaggaagggcttggatttacccttctgcctttcactcctgtgttctaggaccccgcatgtgtgccaggatacccatattttgaccttttgtgatctttcctctgagctcttcagtgagtctctgttgccactcagagtctctatggataataacaaaagatctattttcttcgttccatttttttttctttttactgtacattgtaacacacctttaaaaatatgtgtgggtggtttttttctacatttatgaagccaaggctctcaaattagaaaatatatgtgactccttggtggatcatatagttaatggttcagcagcaggtcagagcctgagagttttcatttctggcaagttccctgataatagtttcagttcttatccacaatggcagttgttttggtaggcaattaactgaaaatgcatgacaagaaattttgacttgttcttatggttataagaaaaatgcatgctttcatgtttcactatgaagtgtcagattggctgaaggtatatgtcatttttctatctatttcagcaaactatattataatattttattgttgattattgaaataaattagttttattcattcagcaatctgtgtgtgtattgaccttttttcctttaggctaggggtgtcattgattattaaaacgagtaacatacagactgagccagatgcacttatagatttaggagtatgtatgtgtgtgtgtgtgtgtgtgtgtatatatatatatatatatatataaaacaacaattgatgaagagaaaaaccatgaatttgaatgagagcaaggagggtcaaaagggggagctttgggggtgaaaatgaagggagaatgatgtaattgcattatctcataatataaatatttttaaaagtaatagttttcaaagtaagtgagtagctacccccaaaagagtcatgccacaccaacagtgaacattgttcacttgcctgtgactcaacattgtaacacccacattcccagttaggtataattgctaataaattttcttactcaggaatatacctagcacgttctgctactgtgtgctagtcagctgggagagagctaacagctcctgtccagagtgagttctctgttaaaactcactcctgtgtaaacttagaaaatataataatttgaaactgcaagcaaaagtatgaggaaaagcatacactgtatgtctttatgggcctcttcaaatccattttcctgagaatactgtgattttatttttatgattggataaaattccattgtgtttatgacacttttgttatctaaaataaacccctcctaccttaaaaaaaatcttgttacatttctaataatttacagtatgcatgttcaaatttgcttataagcattcacctatacactttgctaatttatttctgaatatacaagtcttactttatttttatgatgtgaattaattttatataattctcaattagttttatttttaaagcatcacaaaacaagttagatatttgtcctctaacctttatatttagttcttgaagcgattttgagatatgttctattattatcagcattcttacttatgattgaagttcatcgaagtctctcatttgcacaaagtcacaaagtccataaaggatgcagcagaaatttgtggtgtcaattatacagtggataaaaggatttcacccaatttccttgcccaatcctctctcaaagtcacaatctcttcttgaagttagtgttacacacacacacacacacacacacacacacacacaaaagcaccatgcacaactgaagacaatggcaccttttctcccatattcttgagtacaactctagaatttaatccttggcacaaggtttgttgcttttataaagatcgtgatggggttccggacagtccctgctagcaccccagagcttccgttcctccatgcagaggaggtgccagaccttagatcacactgaagaatatgaacactttcctctgttctttcatgacccagacctaaagcttcattttctcagcaatttcatttaccctataactttctcagaatccagcagtggtttgtctgattaaataagtggatgcctgcccttgcacaagccttgggaaatcacctagtcactgtgcgctgatgcttagctgagctataacttcatcactgcatctcggtctgtctggctcaccaagccataaacaaactattcttctcaccttaccacatgaagacagaaaggccatcacattctttatgaaatgctgtgatatacattgaaatgtctgtttttgctttcgcaagatcttccttaaactctggtgtatttgcttgtttgattggttgggttgggttgggttgggttgggtgggttgggttgggtgagttgggtgagttgggtgagttgggtgggttgggttaggttcggttgggttgggttgggttaggttgggttgggccgttagagctggacctttccattgaaaacatttttatttaactctgaaactttttctttgatccatggaaagaacagttaaaggaaaagaaaggtggcgccattctcccatgagctgtctgagctgcacagatcattctgttcctgaatggtttaatatcctcacttatgagaacagctagaagggacatcctttgacatacccactggctaggatcatcagagattcagttcacgccacaccatatttggtcactaaagcatgagttgtcacaattgataatatgatacattactgtccctagtgagaaacccattccttaaccacagtgctagacattgtctgtcactatcctcagggccactcagaaatctcatatgaacaggtatccatggctttggaatatttaataacctcgatcgaccctctgcatacatccctatttgtaattttgcaatggaagatttagtggaggaaatataaaaatgaagtcaaattttatcctaaggaaaaataaatgcagcaactcaatataagttatctttattttaaagaaaaggagtgagaggtttctatgtttgtatcttattatttatgatcaacattttgtccattatactcaccacggctgtcttaaaaacactaggcatagaaactacatataatatacttgtacattagtaagaaaaatgatcaggtctgataatatggctaaattttagattttaacatattttttcttttaagccagacatcacctaactctttccaaatatactgactttctttgtttatccttggcactccttcatactttcttgtctgatgctcttactgtaaaattatgttctagtagtggaaacgcccatgtttgtattaaacattagcatattttcttttcagcaaatatcactggacttgacttttatcaactgctttctgaatgaattttcataatcttctcagcttctgtcccctggaactggaaagttcaatgtcaagcaagtcagttgggaggaagccccctcttgaacattagaatgcgggtttaccagttcagggcggggtgggggtgtggaaccttgaagggaaaatagcagtaacttcctagagtgtctttgcagagtttatgagccgcacatggttccaagacttacgagccaagagtccattgatagctacgtgtttatgtgttacctgtgcactgtaaatctgacatcattgactcagagaggaacagggatggagacaagtgatccccagctcatttgaccttagcccactccttccaggagacaagctgccacatccgagtcaaagtggattgtgtgtcacctttgaaacctggaatgattgagatttaatactcttttagtcatagaaacactgaattttctttctttttcttgttgtaggagcaataaaacttcagacctttcatatgacagtacacaacagtacctttaaggcagatatgaagattgattgaaacacacacacagacacacacatacacacacacacacacacatacacacacacacacatacacacatacacacacacacatacacacatacacacacataaacacacatacatacacatacacacatacacacacatacacacacatacacacacataaacacacataaacacacataaacacacatacacacacacatacacacacatacacacacatacacacatacatacacacatacacacacacatacacacacatacacacatacacacacacacatacacacatacacacacatacacatgctgtattttgtttctgttctgaagcttcaaaagcttttgcatcttagaatccagttcagcccacatttaattatattttgggtgtgcatgtgcatgtgcgtgtgcgtgtgtgtgtgtgtatgtgtgtgtgtgtgtgcctgtgtgcatgtgtgtgtgtgtgcctctttgtgcctctgtgtgcctgtgtgcatgtgtgtgtgtgtgtgtgtgcctgtgtgcatgtgtgtgcctctgtgtgcctgtgtgcatgtgtgtgtttgtgtgtgtgtgtgtgtgcctgtgtgcatgtgtgtgcctctgtgtgcccgtgtgcatgtgtgtatgtgcatgtgtgtgcctctgtgtgcctgtgtgcatgtgtgtgcctgtttgtctgtgtgtgcatgtgtgcctctgtgtacctgtgcgtgtgtgtgtgtgtgtgtgtgtgtgtgtgtgtgtgtnnnnnnnnnnnnnnnnnnnnnnnnnnnnnnnnnnnnnnnnnnnnnnnnnnnnnnnnnnnnnnnnnnnnnnnnnnnnnnnnnnnnnnnnnnnnnnnnnnnnnnnnnntgcctgtttgtctgtgtgtgcatgtgtgcctctgtgtacctgtgtgcatgtgtgtgtgtgtgcctgtgagcatgtgtgtgcctctgtgtgcctgtgtgcatgtgtgtgcctgtttgtctgtgtgtgcatgtgtgcctctgtgtacctgtgtgcatgtgtgttcctttgtgcatgtacattccagtaaacacttggagaaaagtcctcaggtgcaatctatgtgtatgtgaaactcacacatacaccttttgattttttggttttgatttgtttttagaaaaagaaaatctttcctttatctttcccaagtaggttaagcaggctggcaagcaattgtagggctctgcatgccttgacctctccaggactgtcattctcagtgtctttacaggggttttggtgcttgtgtggtcaacaatttcctggctaagctaacaactagccccgagttatcacaaccttttcaaatgctctttggaactgtcacatgaagtgatgagactagaacacaaatctctctctcattttttaattgctaatgagaatgtcatgtgtgaaaatctccaaagtcatatgttccctctggcactaacctggcctgttagtgtagtacatcatccaagaaaatggaatcgattggacatcattcattaggaagcctccatggatgcttcttaactcactgccttaaatgcattgttttgaaaagtacactttcatattgtaacaaataaagagaatcacgtaagtatttaacctaagatattcttcaaatttttttgttttcgagttttgtggatttcctgtgaatttacagaaatttgtaatgaatgccacgtatttgctaattgggttcgagtatgagttaatttttttacttagttctgaaattcacacctacacctatgtcttacacttttgtatattttaaaaagttggtttagcgttgactctctaagcaatgtgctatcatttccatcttttcttctctctctctctctctctgtttgttgtttatgtatttttgcatagttaagaaaatacttgccatttttgcttttcaaactcacgttattctttaaacatttttctattgtctgacataatctctgcagacacatgtcagttgatacatgatgcctgattaaactaaaagctgctttttttatgttcaagtttttcctcccagctactacccctcagaactcttctggcagcatctttagaagaggttttggacatgttaatgagtttcttttggtaaatcctcaatggcgaagaagttactaggtcacagtctaggatgatatttctgtgtctttcttaacccccacggtgctgctgtttatttgaatgacctatttttaacattttattgcacctcagtgaaggtttgtcaaattccattttctctaattaaatgttactaccatgctaaagttcttacacttaggttttctattaatgcagaaaacatgacctttctgccacagctgttggatcagcagcgagaccattttcaaccatgttccttttgtaaatttggtactatgttttcactaaaactttcatcatttcttcaaattgctttgcactttcctgctttttaaatacatttagaaagctgggtttttttttttttaattttatattcctgtatgtttttagatgctgtgtctccataacacctttacaaattcttccaaatgaggctgggtttgaccttcaattcttacaaatgaggctgggtttgaccttcaccttttgcccattcttttcctgtttcctctgtttttaaagaggccatgctatttctttctctcttcccatgtttctctgccttgtttttgccaccttgcctgattactccaattgttttgagactacattgctacagtcatagcttcaattcaaacttgtttggttgaaattagggcccattgttactattgctacaccctttctttaatttctttcggtctataattttttcccactctgttatatatgtgcccttagaaattaatgttagcctttattttttgcgccgtgatttgattcatcctgctttcctccaactcctatatattcaacatatgatatatttaccatctagtttcagtacgttaaagttttgtaatgatttttttcctgacacaatttattttgaattaatttttaaacattttcccaaagacattagctttcatattttaactgttattaattcataacttggttttgctgtttggtataggaagatactgtatctgtgtatctgatatgacctacctttatgtgccaagactcgcttaactggaaatggtttctcattcaataatacctaatttaacatttaagatgtttagatgctccactagtctttccctttgtatcttggcccttactcatccttagaggacaatgttagacatcactctagcaatggatcatggtcaagaaatcgagttcttttctttcttttatttttcttgccttcttaaaaaaaacctcagttttcacttcaacttaaagatacttttttttcttaatcatttcctggatttgtaagaatgtcatccattgctttaaagataatcaattgtttaaatcatttgaattgtcactggataaatcgcttgataccaagcagtaatatttggcccttattcctgtttctgagtactttaattcttactcgtgttgttgcacaatttcactgtgatggatccagaggtttacttttcataatgttaaagttttttagcctccttcagtgagtgtgtgtgtgtgtgtgtgttattaattttaagagtcttacctgctgatttgaaatgttacttccttgtcattcactttactatcctgtagaatcccagcaagacttctgttttcttgttctcacgtctgttctctgtagctgccctcacagcctttccactcctctgtctactatgtcttacagttgttctcacgtggcttccaactcacaaatgcagcctttgggtgtctaattcattgcttaatccagatatctattagatgctcagtttcggagtctgttctttttattttaaatatagctgttgagtttttaaaggactcctcctcatatgataaatgctatatgatctctttaaatggattaaatagtctactttacttcaataattctaaatacttcggctttttaaatctacttctcatctcgtatttctgctagttgtcatacataaaagttcactcgttcatgcaatggtttccttttaatttttgtaatccctcttcttagtattttatctgaagaaattacttatatgcaaattctattttctatagaatttgtttttgtttttgtttttttaatgcccaatctacctatcaagggtctagtatgaactatacgctcagcttttgggtacccactgcaattgacacttgtgattagaatttttgacagaaagaaaattggtattgtcttgggtgcattttcttttgttgcaataaagctctgatgaaagacacttaacaggggtaaggattagttttcactcacacttctagggtaaagtctgtcctgctgggaaaggccagggaacaagggtgtgaggcagcttgcctgttggtgtccacagtcaaatatgcagcactgacaatggagcccactattcagacccttgtgcatctgttcagtccagtacccctgactaagacatgatgccctcacagttgggacagggcttcctacagaatttaacctactctttgtacccctcacagggatgcccaaaggctccttccctaaattctgtcaagtggccaatcggtggaagccatcacaggtatctgcttggaagacacaggcttatcctcagtgaaaatttccattcagtgacttttgagtttattctgtgttgggctgtgattctttctctcacacacagcacattggcaaatgccttttgaaaagcatcaactctgatagctctttctgaaaaaattctattttcttagtgtcaagattcaaaaactcttaatttagatttttcatgcaattatccactataatttttttgtagcaaatgttagttgacctctaaaataaacagataaggcaacagatgtaaatgcacagcttggtgtattcccacagaggggacaaaccatagggccagagctagatcaaaaagcacagcttctgtaacctacagaagtgtctttgacatgtccttcaaggtattgtccctccagggcggtaactgctattctgaatttcaataccatcttcatgctgctcatgaagagtgttccctagtccctcctcgtttaatgtctaccttatctggacatcttatctgtaagagccatctgtcttctatatgcttttcgctcattttctgtctcatataaataagccatatattttttgcccattttattgttgataaacattggagctttttttattgtaagtcattatgaatcactcagctatgaacgttactgtgcatatctaggtgtatgggagttagtacttctgcctagtagatagttgaagttgcttgttcatgatgattgtatactccatagggctggcaaactatggttttggaggtcgcttttacaacttagattctgtccatggctgtctcagtgtttggcttgttctccactctagccagtacttttcctttccttcattctcccttttcgttttcatggtgctctgctgatagctgctgattccataaattaaatgtgtgtgtgtgtgtgtgtgtgtgtgtgtgtgtgtgtgtgtgtgtgtgtatacatacatgtttaacaatgcatttgtagctagatcattgctggaaagtattgtataaaatcacctaataattttcacttgggatctccatttttgccttaatttctcgttattatttcactacccttgaagtgatcctttcatttgcccatcctgtccttgagctccccccgctgatgaacatgtgtatctgcaacagtagagtcttagatgatgctgtatttaaacagaaaatcccattatccaaaacagcaaggctgtgacatcaatttaacgtattgacttgggatagaagaaatgttgaaattaatgcttaaagctagtatcataaatataggaaatctctatgttcctccttcatttcactatcaatttataattctaaaaacaaataaaatatttagaattgatactttagggctggaggcagggtacagtggtgcagtaattttctagaattccagagatccaatatttgatctctggcaccacaaagaacagaaacatatgatatgaactaataatttcaaataccaattctactggcaatgtaggctaatttataccagatttgagttgcttattattttctggcttcatattattaaaagccagacaaactaactgagccatatgttgttttctggggtatggctccaaacacattgccttcattggcatgaactgtttctcatgggaatacactatctaaggtttggagatttactttttgcctgtcaacattaatctccttaacattcattttggaaatagggtcacatacacctatactaatgcattgcaagaagccaatcaagtgcaggtgtaaaaagagcgattttgtgtttctctcgatgccttaagttaatgatgctgtttgaacacatttttggaaaagtactagtaagagagccatttcagagtcagacaggtggatgcttccaacctctgataatgttcatgtcacttcccattctccacctgtgccttccccagttattaaaactgcagcctgcttaggctcagttctttgtggccctaaaaagtagaaataaaaaataaaaggaaactagaattttatagtcatctcagaagagcagacaggagatgcatgaatgcaaaatacagaaggatagagtagaagtcattgtgtagactcgtgcgagcatctcaccaaaagtgtccccaaaagaaaatgcaaagatgtattgccatgcttttcttgaaagagtgggtcaggcatgccaggtagaaaatggtttgatagggaggagataggtttgggattctatgacttcacaaaatagagccaagcagagcatttgcagggacagaaatgtgtgactcaacattcccctccccaccccccaggtatcaaagtaacaagccttggagagctcttggaggtttggacaaaatgagatttcaaagatgtctgagacctgggtgtcttaggcacagagagaccagtccagttctagagagccaatgcttctaagaatgaaaactagggcagcttttaattattgtattgattgcccttatatcaaccaaatataacttttggggtttttttttttcatttgaaactcaatgacataagacagagggctcctgtttgcgcacttgtactacagtttgccagcaaatgcaaaacagacttggctaaatgtgtatatgtacaaaacagttactttgtccaattgtattatgaaatggagccttcttaactaaatagaactggagacaagtattagaattcaaaagggtccaatatttctttatacattttaaggatcaatgtcaagtgtaggactcattatgtgtatcatgcaccattataatcacaaattgattttgttcattcagtattttactgttctcttaacacacccagactcaatcttcaacaatcaagaaaattttctatccttgtttttaaaagtctaccatatttgaaggaaaacggaaatacagaattgatagtaaatacacaatatactctttatatcatcatttcttctatgtctgaccatgcacaggacaacggtccttaaaaataattacctagtgagctgtgatattgtggtaaatatgtattctgatgcttacatgcgataaaagtacctagtgatggttttcttagaacatctcctcaaacatgactgtttcataagatttctaatagagaagtatatcattgtgattatatggctttacatctgtgattactctataagtgctgatatgtgctatatattaatactattttatttactatttgaaattccatgcaatatctttagatcttatattgatcccttttttaatcctttcaggttccaccaccatcaccttcttagctctccaacttacaattttaacaggatagggcatgcttgtggcaaggaaggtctaaatatattgatttgctctctatcctataaagacatggatatctgtgacccacaaaaaaagcacttgcttctaataagagagttcgccaccttctgaattggagatggatattaaagccaatacacctccccactcccagtgctagcatattgaaaagcaggaagaaaccaaccctgaaactccatgagacacataggagagttctaagagcaccgtgtaatgttgacaagtgaaacagtgacagttcaggttagtcacatgtagaacaggttaatgtgccctagcacacgctacatacgtaccttatatcatggcactgaagtactttaccccacacctatgtgtacttaacatccctgtacttagcagcaactctgtagctgtacaacgttagtttcttgggaacctttgccatgggccaataccgaatgcccctttattattgagtaaacctgcatctggccttcccccatcgctgcagactaatcttaccctttgttcgcctcgtccatgtttggtatggttatagactctctgtgtatctcttggaggggacacaaacaatggacgctgtttgtcttttcctgtttgccacactctgtggagttcttgacacactctagagggtgcaatagcattctgtaatattgtggtccaatcacgtttcttcatactctgaatgatactacattgaattggtttttccacggcctgctctccacaaattgcactttctaatgtctttaacaagacaacaaatcatcatagtttcttttctctcaacttagaactcccatatattgaagagacaactaaaagttgggggaaaaaaagggctcagaatcaatcaaatgccttagggaaaaacccaagaccattcagtgtgtataatacatgccttcaacatcaaggtgttgtgaagatgatacacacaagctacaaagtggaatcaggtgtccgcatgtcctttccattggagtagtcgatgctcaatatcatcaacgaagagaaaaacaattattgcaatattccccaatgagaattttacaatggacaaaacaacacctttagtaataaagaaattatctaactggaaactaatggtcctttcaactttcctaagtgaattgaagcaagtaacttatttatcttgctctcaaagtaagcaagttgttgctttcttttaaatacccactcctggattttacatggatagagaaacagaaaagtttcccactgatgagatgctgtctgcagctttcagagtgtgagccacatggcccaaaacagactcaatttgtctctggagtagagatgatgaaactgtgatctgttctttatttaggcttgctgtttcatttctgcaactacggcacaaatatctaatgtctctttttgtgtttgtgatggacttaaacattgactggccatatgcatataggcattttgctgtcctcagggaatctccataaatttaatccattcattagccatatgtccacactgttaagtgccgtttaatttaatatacatttattttgagtgagtgctctcctttaagagtgatgtccactctcagaagacactgggggtgtggtcgtgaagaaagcacagccccaatcctcagagagctggaacaaagaacagagcagggcaactgccttgggcctctgctttgaaccagcctggggaaactgagtaggtgcctggttttagctatcataaacatacatgaaaagctccaggttttacttcatttgataaattattccctggaatttagactctggggtgtctactcttctttacattctaattaacagctttgctggtcagcacacatactcacatcattccctaagtaccccctgccttcccccacccccatatagttagaaagtttgtcacatcaatcaacatgatgtgcaggacttatgttctaaatatttcttaaaacccttcccttctcatcactattacaagttctgttaggtctgttagaatcatcatcaccaccatcatcatcatcaccatcatcatcataatcatcaccatttgttttagactataaagtatggctgacctggaacttcctgtgtagaccaacttgttctagaactcaagagatcttccttgccactgcctcccaaatgctggaattaaaggcataggctatcacaccaggctgaataattcttaaaataacttaatttatcattggagaagagttattgagatctgagaacttttgagcttagttattctattggggagatggctcaaaagataactgaacatcactctatttttttctacctagctgtttctttacttgtacacaacttgctttaatacatagattattagtttctctctcctttccccagttgcctcttaagtctaatcaaatgtggttggttacttccataacatttttgccatgattatactagtatatctagtatagattttgctactagtatgctagcgtattgtactagtataacatccgaagggaacaatataaacgtgactggcagataagaatttctgaactcatcatgttattcttgcaagtatatacaagtatactgcaagcagatttgcaggcaggtctctactggaatttgatggtttgtaatctggataaaattcataaatactttttcacctcaggtaatgtgaagtgtaactttcaccctaagtagaggggaacctacctatagcattgtcactagcatgcagtgtttcagacccctttggccaatgactcaaagagatgtaacatatttctggtgctggaattttcacctgctagcatatgatgtctagttggggtatggtctcctctaatgtacagtaacttatttaaatttcctctgtatatgcctatatttctattgggaagcttctgcagtagtaggtttctacatggcatttttcaaaagatctttaatgttagctatccctctccaattcattttgcctaacagcaaattcctattccattgtataaatgtcataaaattccattatccatgtgcatctgctgcttctaacttctggctcgtcggatgagaaagtatcgctgtaggatgatgcggattccgttggctatatgtccaggaatggcgtagctggatattgtaatggatttcctgttcctctggatttgtccccgttgttttctgctttctaagagtacatgggccctccctctcaactctcagatgccgatggacacctcacctggcacctgttattatgagctgttagtcatttattctactgtgagttcctggagatcagggaatgttctgcacattctgtcttcctagtgccatcctacttagtagacacttgttaaaatcaaggggtcttaatacctagaaaaagaatagatacagaacgcagaagataaagggttaggatgcctgaaaaaaaatagtaacaaccacagttccatgaaaaccatagactatcaatagtctaaagaaatggtgtttaacagggatatggagttattcttgttagaaaaatgagtgatggaaaacagactatatttctcatgataagacttctgaagatcaaaaataagagtcaaaagtggtaatatgaccatggttagaaaatttaattcttttttttaaattttttattttattttattttgattaggtaatttcttcattcacattcccaatgctatcccaaaagccgggtgaggtggagcacgcctttaattctagcacttgggaggcagaggcaggtggatttctgagtttgaggccagcctggtctacaaagtgagttccagaacacccagggctacacagagaaaccctgtctcgaaaaaaaaaaacaaaaaaacaaaacaaaaaaaattaattctaaagtctatttttttttttcaaggcagggttttattgtgtagctcagaatggctccgcagcatcctgagtgctggccttccaggtgtttgcccttacttaactgaattctggtagcaaaccgaaataatgaaaaaagacaagttggcaatggcagaagaagctgtaatatgagaataaataagaataagtaatagtcctgaaatgacagttgggaaaaatatctgaagggaggattataaatgtgactggcagataataatttctggactcattttgagaaagggctcatggttctgtcgcagagaagacaggtagagacaactgcattttagacggataaacctaaaatagacagatggtacctagtggactcttgcggacgaagctcatagtcatttgatagttccatcaggaaagttaagcataggttctgaactgtataaacaggaggtggaggaaatacggcatacgtagataggatggacttgcaaagaggaagcctctgaagtgtagaggcaggctaatgggctgtgaagtcacaaggagaaaaacacgttcagtggaaaccattttaaacgttagtgccttccagagaaagcccagtttctgtgtggtgatgaaggagctgaacgagtcattttcaaaggtgaccaaagatgtagctaaatgtgctcacactagcaccaacttagagaagactcaagaaatagctgcttccttctacaaacgaaccttacctccattgttcgagattaaaggtgtaggctaagggcgggcctgtgttccagccagagcggccacactgctgggttaaaagtcccctacaagagacttaggggatatgtgttaggaattttctcaatatctgtagctgttgggtaagaagaaggggatgggtgaagatttggcaggttctgctgtccccaatcaaaggcagttttgggtgagagacttagctgagagtgctcaggtatcagctgtcaatacaggcatctgctggaggaagagaaaccagtgacctgaatgtgtacctgggtttggaatgcccacaatgtcatggtgtaattttatcatgcagctctggccttttctcgtttttttttttttttcccacttcttgtctgggtaaccaaacaatcctttactcctgcgatcatgtcacagaagatccgttgtctcccgtttcattactgaaaagacaaatctctatatcacacccaatgtttagctacaatatttattatgattgaacagtgtccaagccaatatacggaagatctttctgtagccatgcaaatcaaataaagatgttataataatttttatagcatctttctggacaggaactgagaaaaggacttcagtgtttcagaacctgggtatcagttacatttcaaagtaataataaaggaaatactccctaagatgcttcagtgtaatgtatctacatgtgagatagtcagtttctatataacataatatctgatttaaagacatccacagcttcctcctaggagagttatggatcatgtcattcacttactggtttattttttaaagggtgataaaacatacattcccaacacacagtgaatggtagagaacactataaaaatctcctttatacatatcagccaaaaataaatgatactaacatctcctcacaagttcaccttgcttcagataattaaaaaaattaaataaatacagtacatggatatattgaaataaatacccctacaagtctgagctgagaaaaagtaagatcagaaagagatgaccttaacctacatcctggggtcaggaagcagactcaagtgtcactcttcactataacattttttaaaaaagatttgttttaaatgtatatatatatatacacacacacacacacacacacactgtaactgtatagatggttgtgagccttcatgtggttgttaggaactgaatttttaagacctctgctcgctcccgtcaacttcgctcactcagtccctgcttgctctggcccaaagatttatttattattatacataagtacactgtagctgacttcagacacaccagaagagggcatcagatctcattacaggtggttgtgagccaccacgtggttgctagaatttgaactcaggacctttggaagagcaggcagtgctcttatcagttgaaccatctcaccagcccccacactataaagtttttgttctgttttctaatgactttacagagccaagagagacctgcggtgacacagtcttatagcaggggcataaatgagctctttatgttcatgggcgcagtgtttgcctttattttattaagtttctatttgtcttatacttgttattttatgggaccatgtgagaacaagatagcttatttgtgataggtcaatgtgcgttagtttgtactattagtcttagagcacagaaaagcagagatgagcgtgaatggacaaagacaaatgtctgccaccacacataagcagtgcttggatcttgcctggcttaagctctgtgcatgagctgctgtcctctgggtggggctatttttgagctcagaactatgtttagttgactgtttattacatctgttaggtacctgcccagctccatccataaggtgggtcttgtcataaagtaccaagatgaggtttacgaaagtctctggttgagtgattggcatgaaggaactagtaaacattgatctgttgcaatcacctgaacaaatcatgcttgtatgtgtgtggttttgtgtgtgtgtgtgtgtgtgtgtgtgtgtgtgtgtgtgtgtgtgtgtgtgtgtgagtgtgtgtgtgtgagcatgtgtgtgtgtgtgtgagcatgtatgtgtgtggttgtgtgtgtgcaatattattaaagatcaacatctgttacttagacaattatttagcatagaaaaaattcacttagtctagtaaccacatttgcttggaaaaaaaggagaaaatatcaattgcaagcgtatctcatgtttattgtcacatgagaaagtacaagtaggtaactatgtgagaaacaacttcctagtatattagtggtaatagctaattaaagtgctattgttattttattaaggcaaggctgttactgtaatttcactttctctagagaaatagcagagattttattaaacacatacttttgaaaagttgaagtctttgaaaactattatcattactatgtatgagagaaaacaaccatgtagggaaaaatgtgttccgtagaaaactggtaggttattaaaatacaagaagtaagggggaaataccgaaaactgtgagatattgtcaactctctcgtgagactcagctttgaaacaattctttccttttccgtctcccttctcattatgaatcatgttaattccttttcatttctgtgggcacaaagacatgaataagaattcatccatgaagagctcaaatcgtgtgcgtgcaaatggaaagagtattggagcactaaagaagagaaaggaagccctggggagaaacacatcgtcttttgttaaagtagcagggatctcagagtcttaaatcaaacgttgtagtttccaaatggaattctctaaggtagcagttttcaactttgcaatattgctctcccttttctctctctctctcccttctctctctcccccttctctctctctctctctctctctctctctctctctctctctctctctctctctctctctctctctctgtgtgtgtatgtgtacatgtatacacacacacatggccaatatccaatatttccatatatcaaatgaaattgtgtttaatcaaggacaaatctgaggtgttaacagtgtggtaaatgcatgcttttctagaggttcttgcatttgtaaagaagaacagagcatgaaccaagcagaggctccaatgtgtttcacatggggatcagaaataccatttgtggttctgattttaaaaacattgacatgcataggaaatagttcaaagtttatttgccaggaatatctgtcattttcccttttgtttttaatttttttccaatgttccctctcctattcatcctcaaattttacttaccagctaagttcccaacacacccaccagtctctcaccacagccatgcttttaataacagttgcatccaacggcatttgtattttctgaaagcatattatatttcaatcttaccttttaaaagctctttgagaagacccctacccacagagaagacatctcctggcaactataggttatttacaagtttatgattttgtgggatgcagatctagcttttcttcatatgaaggaatgttctagattaagtcactgttaaagcgtgcactgctatgtacgctttagtgctactctgaccaaatctgttttaaagaaaaataaacctctatactggatagtaaagaattgtttctatcaaggctccttcatgtgtgtatctaggcagcttgtctactttgaactcatttctgctagattaaaaagtggtgtctcaagtcttccaagatgcacgtctcggctgtttctatcagcttacgtcagctctaattatttgaaactagtaaagcataaaaatgtgagatgaaaaacagcaaattaaagcatggccatgggccttgataattgcagcacttttaagcccattacatttcactctgcttcaactgggaaactttctctctctctctctctctctctctctctctctctctctctctctctctctctctctctcctcttgctgatatcagggaaggcaattatctaagatgtccgtccactggtaaaaggcaaccatgtgaaccctgagaaaatgagagagcagaggccaaacccacaatgatctcagaatccttcccagagtgtcggatggagaatggtatcccgtccatatatagactgagaatagtatccaaagattgaagcgggcagggaaactacgtaggggcattcttgggtattcttgggacagtctcggcagattgacccccacaggctcctgtggtccattcccttacagggtcaagtgagaagaaaggtcccactgtgacatatgggaactcagttgatccttgtagtgctggggatgagtacttcttctcctgttgtgtgtgacttgtgaggtatcacttaacccataattacatctaagtgtggagacgagtccatggggaatagctcttcaggatgcagctttgggtagtagtctcatttctggtactacttcttcctggtggcttcttttctctccctcttatagaaatagattggttcttacataatatatcctgattatggtttcccctacctcccggtccccacctcccacctcctctcccatccacacctactccctttctctctgtcattagaaaaaaaaagcaggtttctaagggataacaataaaacatcaaaataaaatataataaagtaaagcaaatccatctcactggagttgaacaagacaaacagaagggaaaagagtaccagaaaaggcccaagaatcagagactcactcactcacacgccaggaatcccataaaaacactcaagtgaaaaccataatatatatggagaaggtttattgctagcccctttagctcttatatacttcctgtctcctcttccatgaggttccctgagtctgggtgaaaggggtgacgaagacatctctctttaagcaatgtgtcccaaggtctcactctctgcaaagtatcttctgatgagtatagcggaatgtcattaaggattgttttatggttgcttttattatatgccagtagtacttggttttaccctaggtccttgggctatctagtatcttgttcttgatcacacaagaagtgttgggtagaggtccaagtcatggagttggccttaagtcaaatcagaatttggttggttactgtagacaggaaaccattctagatcaaaggatttttggctaggtgggtgtttacatttcttttggtaatatccagagtacctttctatatcagacagggctcactgcaggcactgactcgacttctctgtgttcaatggactgtgaaggtgtcttcagcaatgggccctggatgtcagttggagagcaacctatagtctttgcaacagacggtgttgtttgaggattcccatgggacttctttgaccaacaactcaattaaacgtatctcaatcctggaacttcaggcttcatttggtaaaaagcggtggccagctggggctttgtcttcccaattatttgtcaatttgttatatggccttcatatgtgtatacatgttaggaagcttctacccatcaaatggcccttaatttacctgccactccttgtattcccttcttcatccccttctttcctctccccacttgatcctcccattccagccccagcccccaatatataactatctgttcaattcccttttcctaaggagagctatgtgttccacctagtcccttactgtgtacctaacctctgcacttctttagattgtaccttggctctcattgacttaacagctaatatccacacacaagcaaacacataccatatctctctttcagggtctgggatagctaatttaggatgtttttcttccctagtcctatccatttacttgtgaattacatcttttaaacagctgactaatactctagtatgtaagtgtgccaccatgatttttttaaatccattttattgaaggttgtatctaatttttggctatcatgaatagaggagcaatagatagagttgagtaaatgtctctatggcaggatgaattgcctttggggcgtatgcccacaaatggagtgggtggatcttgaggtagatcaattcctatctttctgagggactgccatactgatttccatagtggctgtagaagcctgcactcccacccccaatggataagtgctcccccgactccatagtcttgccagcatgagctatcacttgttttattgatcttatccatcctgaagagtggaagataaaagtcttaaaagtagtttgactccagtttcactgatgctgaaggatgttgaacatttgcttaagtgagtctcctccatttgagtttcctcttttgagaattctctatttacatctgtaccccactttttaatctgagttatttgctttcttgatatctggtttcttgagtcctctctatttggatattagccttctatcagatatgtagctgataaaatcttttaccactctttaagttgctgctttgtctgaatgacagtgtcctttgccatgcagaagcgtctcagtgtcatgaggagatccagtttattaatttgtgatcttaatccctgtgctaatggtgttctgttcagaaagtcttttcctgtgccaatacgtttaaggctattgcccacttgctcttacctccatggtctttgcttcagttcaggccctggtgtacttgttacgtgaagatgtaagatgaaataaacccctccctccccaagttgcttttgatcatggtctatatcacagagacagaaaagcaaattaggacagagagtcagtatgtaccagtgatttttaagaccctgtacacttttgactggcaagttggttacctttaactgcaacactcctctcacaagctatgtgacactgggaatatcactcagtagctccaggtctacattttctcatgtacaaagtagtgataataatatctgcttcaatataaatgttgcacaaattagctaaaaactgttgtatgagtgtgtgtgcatgtatgtatgcatgtgtgtatgtgtgtgtgtttgtgtgtgtgtgtgtgtgagagagagagagagagagagagagagagagagagagagagagagagactgtggggggtagggaacataggagtattttaatcagtgtgagctaattttattaacttgtgaataactaacacaggatgaaacagaaaaacatgatgcctatgataaagtttataattgttaagagacaatgtattagtattatatgtattttagactgaaaatctcttctgtttctaaagaacaacatagaaagtctataataacattagatagtcagagagagagaaaaggccagggaaggtgaggatgaaaggtgggaactctgggagaaacaaatcaaacagtatggttgcctaggcaacactgttttcaaatgctgggaggtggtactggccttacagaatctgcaaaccaatcatgttcaggccctatatcacctacattttaatggaacacagactgtctttcactgtatatcatactatagagcacagaaacagaattttagataacagtagtgatcaaaatagagaggaatcagaaggaattgatcgttctctacaggctgcctattgtaggctggtggaaggcattcacaaaaagcctaaacccttctgccaatttttcaaaggaactttgatggtatttagatggcagcctcattttatagtgaattggattttcacagaacccaggagaatcaagcagctggcatagcagttatctgaatttgatctaaattgacatcagggggctgtgagagctcaaggcactcccgcattctgcctctttgtgacgtgctttgacagcagtggggttgtcactccctcaatgtgttggctctgatcttatatgattggaaagcatttagaaactttaccctcttggattttcaagcaagatatttcttccaggaaaaaatcatcctgcaatataattgcatatagaacacaatacatgcaaatacccatataaccaacccaaaccagaatcctgggtcgacagcaatgcccttgggaagacaggttatgaagtcaaacattattggtagagatttacattgaaattaagccagatttttttcatccaaatcatgttaatctcctaggtatttctttacaatgccaagatcatttcagtgtggctatatcaataggacttgatgtttctgtgtaaatcattcatatacattaataaacaacagtgctataccatgaaaaatcaatcccaagtggctatggcattgcatacattattggaaatccaaagacagtgtgaatttccctgtgctgattgtgtggctgcttggttatttaatgacttgatatcgatggtagatatcattagctgtcaaatagtgattgatgactcaccaaattctagaatactctgaggaattcagtgctcatccaggctacattttacagctcgccgcttccacctctgtgagcccacgtgagtcctgctttgttgattctgtgggccaggactgccatccccctctcttctacagtttaattttgtttttccttgtattttttttcccttgattttctaagaagctacgagcagaactcctcaagattgctgacagtaaagcaatcaacctcacccttgctacttagtgttgacagggtcatcacaaccaggcatggaatggggttggggcagatgacccaaagtgggctctggatggtgctagagtaaacacacagagtttatatacatgagggatgtcttgataaaggcattgacacattgttttccagtgaacctctgccgtcactttctccttcaaagttaatgtttatatttctgcagaaaaaaaaaagtataccttcatctttcctactaaagccagagtatctagcattagaatacaagcagcattagcccaacccactacatatctatgtgtgtgtatacacacctttatgtttgtcagacttgacagagtcaaattctaatcttcagcaccctcctaaatttcacattctctagtttctcacataaaaatgtgacaggcattttcttagaggcacgtttgtgtgaaacctctcatgccctgtagtgttaggtgtcgaagtcctcaaaaattgcttcagttctaattgagtgaaggtgtgttgccaacaaatactgactcaagcattgcctatgccccccccccctttgctagagcagtggttctcagccttcctgatgccacgagcctttaacacagttcctcatgtggtgacccccatccaaccatacagttattttcattgtaacttcataactgtaattctgttgctgttatgaattgtaacataaacaattttggagacagaggtctactgaaggggttgcaacccacaggttgagtaccactcttctagggcatggccatgaagacaaagggaggagctctttgtcacggtgctgtgatttaaagggctccctttaaaattagcttctacagtagtgagaggagtcattttgtaatgttatttcaaacactgagaccaaattattcctgtcgtgataaaagagtatgccattggaaaatgaagaacttttataaaaatatatatcagcatgagttggagaaatgaaaaaaaaaaactggtaattcttcttaaaccaagttcatggaaatgactgtgactgtgatccctcaggacagaagggctatttttgaacctgcatgcatcattaaaagaccgtgccaaaccttttgaatcttaatagtcaaaagcaaagggattcaggagtgttctagggttttacaaatgggtctcaggacactctttccctaccactgcctgtctaactgttctatccacagaacagaaaagaaggaccctgtaaatgctgagtatttccatcccagagcatcaataggcaaatccaactcccttgagataagaagcagcttcacctcgggctattgagatactcagagacacttggcaagcctgccatcaatcccagacaaaaatctcctgattcgtgcgccctgaattgtatacttattactgtgctgtgaatcctcattccactgcagtgtgtaacctccatgtgggagaagtatcacaatgcttccagtcagaaagcatctgcatgttttctactgccttccaagtctaggactgagtgatgctgcaagctaccagccctcagaggaaagcttcttttgaacgtgtcctgtggcttctcttaccagctgcatgtgtgacgtcagctaaaggtcagagtagctttcctgggcaagtcctaggagctgacttggcagctcccacagttggggtcatgtgaccttgactgctttgccttttttttccccaccagtgatgaaatccaagatgataagcctcagaaagctcttgtttgtaggctgtcacatgtgtaccatgcctatgagatgctgccctgtttactttgtaaacagtaaaacctctataggtcttgactataagccattgtcaaaagagagtaacataagtcgttttaatcgggcaggttttattatgagcagaaggggttttgataaaggcaggaactactttcccatgtagattgtcattacctgtctagaacacagaatttacccagtaagggagtaagtaaatagaaactttaaagatgatggaaggaaaaagacatttcttaaaagacttaagaactataaatggcgtgagcactgtaagggactctcatcctggcatgattccccattggtcttcctgatgataaatcaaagacatcacagcatttgccattatactgaagcttcagtgcccatcatgaacaaatgaaagcaatagcaatcttcagtggcccggactggcccagaacctgaatggcaggtgactgtggtggggagtaagataatgaaagtctcctgagacgttgacaagtcaatgtttgaaattctagaccacccagagatctcaggagagctatttccaaagttttgttacactgcttcttgggggaagaaaagcttttcaaagaaaaacccatgacttatgtgtacacagacaataatattgcaaagacaaatattctttacatggatgtaaattatcccagtctttgtaactttacacacttaaaaccattcctaaatagcttagggtttttttttcttaaattattatcctctaagatttagaatattagtgaatcaaatattgaagaatgtctcctttttttgaattaatgttcagacctataaacattttctatattggaaaaattgttaggggcatacttcagtggtgcagcacttgtctccaatgtatgaggccctagcttcaatcccaagtattaaagggaagtagagagagggagggagggagggagggagagagagagagagagagagagagagagagagagagagagagagagagagagagaaagagagatcccaaaatgttcctataagtagaaaggtgaatctatatgccataagagtcagtgaaatatttagccgtgaaaattcttaatagaagaaattagatgttaatttgcacaatccacttcagtaagtacacccaatatatatgctgtgtttactttacagtttttcccttccttccttccttccttccttccttccttccttccttccttccttccttccttccttcctgaagttaaatttggctctctctctatagcccaggctggcctagaactttgtcttttgagtgctgggcttacaagcaggtcgtcatatctactctataatgagattttcttagttcagtgtcacttctttgaaatcatgactgaataaactcctatgtcgctgaaacactataggcatttaaaactgtgggaaagcttgaacaccttacctggacttagccgagagtacagtgaagtccagaaagccacttggttttcctgggagtctgtatttatgcacacatgcatgtgtacgttttcctaagcccagggttttgcaaaatgctacttactacatatagtgatttcaaatatagttttgtctgctacttaaaaatacatttattttgccaccctcccaagtggatttgagtccacagtttcaaatatgctctttaaaatctaaatgggaatttagagttcttatcaggtataaagtactatttggggcttttttgtgcctcccttgttcctgaataataacatggagaccttttatatttatgaagaagcttcttgtattatagctgggccagtactcatctattctgacctgactgtgctggctacttcccagccccgtgcccagttacctgccatgttaggcttttcttggctgttcctgctccatgagtatccttatggcacaactccctcacggggcactccactgcaactccctccacctgagacccccctctctgggatcagaggtccctccttaactttcctgaacaactattggttgatgagctctttgctaagcaatcggaggcgatgaagaacaagttttacacaacattaagacaagagatactccataataatgacagtgtcaaatcctcctacaaccagatacctggcatacataaatcagcatatgtatatgccttgcacaagccatccccaacaatcaaaattgtaaagagtccatagcaagattggggggcagggtctttcctttctttttttttttttccttttttcctttccttctgtctttctttttcttttttcttttctttttttccactaaggataggcacaaggcaaatagtctcgaatgtactaaattaatgacctgcattgttttgacttaattatgaggagctagagaacaagtgatgtatttagtttggaatctgacttaggctttgtagagtcagtttttccagccctcacagtgttctggagtcattggaggtgcacagtgaatgatgtagaacaaaagagatgactattcaagaatttcttagcatcggctagggaaagaaaatcattgttttaaagatacttgccaggttactgtaacatgaaacccgagtctgcctttgccttgatcattgattactttgtcacactgggaacacttcccatggcacatttaaaggtatgttatgtgcattacccaggagcaaggggtactaaataattaactgtgatgaaccttaggagatggcacaacattgaaccacttcaggacacttatcactatagtagccagaatttatttatctaaaaacttagaaagagaggggctggagagatgactgtggttagaagtgcatactgtgcctgctgtgtgtactgtgacacaggtcagatggctcacagtggcctgtacctccagatccaaggcctctgatgagtttttctggcttgagtaagcactatcacgtacaagcaccacccatctacaaataagcttaaaactttaagtgtctttccttgggattttataaaagtacactgagaggctcaggttacatgttgcacactgctttattaactgaatgtggacccagaattatttaattcactaaatcaaatatgcagttataatagatgcaaatgtttataatgcttatgagtcttcgatatatcttatctttcaaaactaaatttacccaataattgtttatttatttttatttatccaatcataattttttgccattgattctgatcatataaacccaatatatgatatggaattgctaaactgcttggcaaatatgtctaaagcattctgtcaactaatttagaaatttaagatattgacaagcagaaaatgttttgtgcccaatttgacaagacaagagaagggctagtaattaacatatccacttacacatgtaaagaggttactttgagacaagtttttcttttaggtagtttcaacatttcttctgccatcttactcattgttttgtaatggtggtgactggagttatcagctgaatgcacatcttttttaaattctctaacactgtgtaacctgaccctcatcaacctatttctgttcctctcatgaagttatgcgtagttcaattttagccttcacatatttatttccatggatatggaagtgggcatatttccttcacagaacccttaaaatgcctatataacattaataatgtgatctcttgacgataaaattgaaatatcataggcatgtaattttgtaagattgttttatattagtggccattgtcacttaatctcataaattaagctacttatggaaacacttatctcagtatcagccaagttcccttttcttcaaaagcaggatagtttcattttaaagtttgtatatgtattttccagctgcttttaaaagtttcctttttagttgggaagagctatgaaattccttaactggtagtcatgtactttctgtgttcctagttcatatttatagactaatgaacctgttgtcctttttaatatgtcactattacgtctgagtagctgctgacacatgcttctaccgtattgtgtggataagcccaattaccttctgtgtgatagtgctagtaagcatttttaagggatagatgggctactgaaatttaacctacgtaaagaaaggaacttagacttaggtattcaacttgaaatattctgaaaactgagcccacctctgtcactggatcaacagatagaacattaccaagcccccatgcccagaagcccaagtgcctaccatactccaatccaatcccacacttacatgagacctgattctctctgtgctctcaggttggttggtttagctttgctcttgtgggaaaagaacgtatggttttgaatgaccttccttccttcctctgaggaatctgtagtccatagagtttgggggcacaggggagcagaaaagttagcaagtcagagccctatgccaagaaagtttggagatcttagattctgacagcctgacacagcactgggccaggaagtgcggtgtgggaagctaagtttacctttctttgttaacctttctagagaggagaaaaagaacagacctgaggaatgggatggaaaaggaaaaccccagcctctgaaaaatacagtctccaagccttttgaagtcaactataattaccgtgctggttagaattcaagttagactttctgctttgccaacttaattagtagtttaagcatgcagaagtaaaatactgtgccatgtgcacagtgatttgaaggtggaaagaaaatatggacacactgttcctaaaggagttggggaagaaaatctgagattatgcttgtgtgttcctattttatttttcctatggttgctctaaaaccatagttcagaaccttaagttgtctctttgagaatctgaatgaatgtttaaaaaaaaaaaaaagcctcttctgtcaatagtgaccatccaagtccgagtttctgtcaggactgtctgacttcatcgttgtctaaatcagctcacagatgtgattatgctaactgatgaatgtgtttagaaatccccaggtcttcttctaaagtccttactctaaaatctataggttgttccaagatgtccagcctgaaagttatagaggtatgtcctccattgtggtcacctcagggaggactctcctcactgacctgtcctgggcttcttgctctttgttgctaacttgaagatcttttattttctcttattcaaaccttcaattatccaggtccaagtttgcatcctcttgttaaacagaaagatatttctttgggaaaggttaagaaaaacaaacaagtcttgtttttgtgccggatgatagtaattaagtcaattcttagttgtgcttcattctttgaacttaaaaaaaaaatctgtgtataattaacgttttgtgtatgaactttctcgtggcttcctcagttgttaatatgttattgttttggttgctccttttgcaaaccaggacagactaggttgttcgtcagtggtctgaagtctaaatgacttaagatggcaagggttttacttcctattcttcttccattttcagtattgcaggccaaagtctatgacctgtactcaagatgagaccagaagaactggtgctgcatctcaatcgaagcttcctcaccaggagaaaagattctaataaatcagccacagctagtctaattctatgcccagcagtggcacttaccactttaagctcatagccactggacaaaatatatcacagggccaaggctaacatccaaagggaggctaaaagcaatgttaccatctgccccaaaataagaaaggtcagggaattgggtaagcattcagttaaccagtgttgacttttctaaaatcccctccagtgtctccaatggaaatctggttaaagtaactcagagcaaagggggtctattgtcctatattttatataaaaaatatactccacgttaacaatatcacacgttgtactggttaactgtggcatattttactcaatttaatataaataaaatatctaacaaacagaaaaatgaagactagggagaaattataaagaaaaatggccatagttctgctgcattagtgttaagttatcataacttacctagcccttcaaataacatgtgcatggtcatgacaatctcagaggatcaagtctctttctatgaccatcagcattcttaatcaaggctaatcctcatggcaaaggtaaactgagtgaatacagtacccctggtatcacttggtcaatctgcaaagtctaaactgtgccttcaaaggtcaagatcaaggggacagttgcaatgttgctgcatatcttgtttcagtagacctaactcctattatcctacttgacatgtgaagtgatgagcagcatggctaacgtaatcagccattttagcctaacagttgactttagggcactgatagtggcctacatcattctcttagcttggctacttgcttgagggtgggggagagtgacagtgatgggtaaaatgaattctagtttcacaaatttcttaaaacacatctgaaataagtggagaccccttgtcaggaataatcacatctggaaatctagacgtggaaaatcactggtcacaggcattatcgttcaagcaagggcaatactgtaagctatgtttagagaacattaccaaaagaagaaagattctattcattgctgaagaaggagatatttttaacagaatctttgggacagtttcacatcaggaagaaagatgcttttggtaaagtttatgaacaaatttgacagcacgtacagtttcctcaatagcacaaatgattgcaaccaacaaataattcctcgggcatgtatctcattaaataatttctaagttaacatgtgttttattgcaaatatgattatcatatgatatttatattctgtctgctagaaatacccaataataaatatacaagtttgaatgaattgaaattagaatctagctatatatagaagcatatacagaatttaaactgtgaaagtgagttagcctattaagttaaattacgtaacaaaagacgcaaaagtcttttactgagcatgtgccatagtctcttctttcttctaatcaagatcgttttcctttgtttcatgaggggaaaaaaaaaaaacaaaaactcaaacaaggtcatgaacccggcctatccagatctcaaaacctatggttttattatcagagtggatttccttctatttacagtgtctgatgggattgaggaaggcaaatctgtaagaaagcaatcatttgcttgcattctccattcatccctccatttcctcccatgtcaagggcatccatactcagtggtctctgtttggggctgtcgtcaagtagaattaaatctaactttcaaatccccttgtgtaatgttagccctctaattgggccccctatgctgagccagcagtattcagtgtaggttttaggtagacattagtaggataaaatggagctgcttatcattttatgttcaaagcatttagggaggtaagttttacatatgctgtgaagagactaatgcgacccatcaaatcaattcataaaactcccattttgaaggggaaattaaaagtcaaggtgacagagaggatcaacataactcatgtagttgttgatgaacagcatacaaggtctaacttggaaagctgacaaggaagccactcactagggccattgttcaggagcagtggcaacagctgaagtgattcacacagcacagggagacgctggactcctctgtggtcatgagcagactgggttttggcagacctcttctcgagccttttgtctccctctcctttcctgtttgaaaaacatcagcctccgcacataaaccattttctccaagtatgacttccctggatgtctgtactagccagggatcagtcccaaggtgatcatggatagttctgtagacaggcatgtttcttgtagatttcaatttacgtagtctatatggtttaaaatagctgaacacaaactaagtctactcaatttggtgctaatgtcttggttgagagggctcggtgtatcacggtgtcatcctagctgctctgaagctctggagccaaatggccttcctggtttatccttccaagtagctggaatatcaggcacacactagcatgtgtagctaacatggtcttagcaatgtgtgttttcaaagactgtgtctggatgtatggaattaaaggaaaacttaatttctcttttggaaaacacatttttttttaaattcctggggcttgctcctcccacacctgtatcttgctaccatgtgttttctggcttccctatgacagggaatttttgttatatttactgatggtggatagttttggttgttttgaaactttcatttttggaagttataattcaattgcatgattctccccacttcctctcaccaacctctcctatagaataaatccttcttgctctctctttcaaattaatggcttcttttcctttgatagttgttatatatatatatatatatatatatatatatattatacacacatagtttatatattcttataaaatataagtacacccttctcaatctgtctaacattacctatcatgtgcataggatctcaaggctgaccacatagcattggataatcagtgaaggaacatttccctgggaggactgtttctgggaggaccatttctcctaatcatatcgttctcagttctttatctactatcgagacccttagttgcccttttcaaattaggatttccataggtgtcatggttgttcaggtcttgttttagacaaccatgttgattagactttgtgggtatagcctgtctgacatttctaaaagacacagtcttacgacaaacatttttttgagcactgtaatatgaaatgaagaagtatactttcttttattttttgtcttttatttatttattttttacactccagattttatctccctccccccactgccaccatccaccctccaactgttccacatctcattcctcctccccactccttgtctccatgaggatatcatcctcgtggcaaagtatactttcttgaaaacctaaaaattaaaaaaaaggggggggggaatcaatgctataaatgtttttttacagagccattgcttctgggtgctcagccaggtggattttatttcaccacttcacagctaaagaaaataaaaatataacactccatatgctgcaggccagagaggacacacctagcctggcttgctcgccacctccccggaagactttttagcctccctcctttgggatgatgcgcttcggagctgttgtcagcagtgcggttggaaggggacggggaaatgaataggatttgaaggggtgtggaaaggtgtgagcctttccgtgatcctcgggatttgcagaagcctttcgagttatttatgccgccgtgcgccctgtgtcggttaatatttcatctctgctttcagtttctaaacgacagatgctttaaaaaaaaaaaaatcagcgtgaggttcggcttcctcctacccttcgccccatgtctccgtgctccagaccaaccctgttagcccttttgatttaatcttcacagttctgtactcactggagggacagaaaatggatgctaatataccaaaatagacacttagaaaactcgtttttaaaaatgactctgcagcttcacctgcaagtaaaagacataaaggcatttccacctcaccactaatgaccataaatattaacattgaggtcagttcacagtttgccagtgttacggccgtattttaaagttacattttacttcatagtataacacattacttcaagaggatatccttataggtaacattaaatttcatatagttctataaactacttttccttttccttttttgaaaatagattcttcactcatacatcagaccacagttgccctccctccacgcttcccagcgacctcaccacctcccctctccctcagatccacacccgctcagtttcctcttgagaaaagagcaggcctctaagagatgacggtcagacagggcaaaacaagatacacagtaaggaaaggcaaaggccctcgaatccaagccagacaaggcaacctagtaggaggaagaggctcaggaacaggcattagagtcagagacacacccactgccaccgttggaagccccacaaaaacacggagccatcacatatatgcagaggacctggtgccgacccacgcaggccttgggcttgtcacttaggtctctatgagcccatgtatgtgagcccttgcttagctgattcagtggcccgtgttctcctggtgtcctccatcctctctcactctataatctcttgggtttttttggttttttttgttttgttttttttttgtttttgtttttgttttgtttttgtttttttttgtttttgttttttttgttgttgttttttgtttttttgtttgtttttttttgttttttttgttgttgtttttttgtttttttgtttttttgtttttttgctcttccacggggttttcagagctcctaggagaaggaccctatgggaacctccagttaggttctccacataatgtctgagtgggggtctctaaagcttctcccatctgctggcccattgaagatggactctttgagaatgactggacaagtcgctagatctaggaggatagcagaatatctttaggatttttttccctcagtactgtggctcagccttagcgctctgggctctccagtctctctctgggtcctagctatcaggtcgtatagagcatgggctccctctggtggtgtggttctcaagttaaaccgaaatctgttggccattcccacaagttctacacatcattgccgcagcacatcttgcaggtctgatgtattgccgattgtaggtggagggtttcctgtgtattttatgacttcattttaaaattatatttcacttcatagtaaagcactttgcttgaagatatctttgtatgtgatattaaatttgttatacagttctgtaaacacgtttctacaagaaatttagtgaacatttattaatgggcaaagtaacaaaatcttagagtataagaaaaacaatctttggaaggaaatgaaagtttaatttctcaccacatcttactcagataaaaacagtacaagcaatggctacgctaaaaattcatttgaatctgccttaaaggattgttaccatatactctgttacagtcaagctatttgtgggcttatttcactgatgcagcattggaggggtatttgggtttttttgttttgttttgtttttttaatcaagtgcctgaaatggaatgaacaagaaaatagcgccctctatgagtgggaatgaggactgcatcttttaaataacgtattcgaagtctgaaaaatggtcttaactaatggcctagcacaattaaaacgagatgttttacactaggtatttttccttataagcagtttgatgatgagaaaaaaaaactaggaggaaaagcatgtgtttcctgatgtttcattaaattatgtctcattaagtcctgacatcataacggagattaaaccctccgagaatgctctctgcgaagcatcacaccaacagagaaggaacccgtgccttctagcacacggtccctaaatcaggatgtgtatagtggggctgggtaatacatacatttaccaactgttctcactcattttacctctccagtaatgttactgctaaagatgctgatggagcaatcatgtttgctccaagtaggccaggggactgctgcttgcgctgcctttcagtgcctctcctttctcagccagcaccataccacgcagttctatactgttccctccatgaaaacacggatggatgctgtcttttcagtgtaaaaggggggtctctcatactcgtctcactaaagtcccatttcccttggggttctttccttgtttggctctgctctgtcaaggatgaattgaggaaattatttttcagaaggaatattgtctttggcttttgacaactgtcagaagggacaggcctcttcatttggtattcccaaagcttgtgccatccattccagaattgtcactcaccagagctatgctaatgccatttctgccttccccgtgcagacggtggggatttctgtgcttagcagaatgccaaagatatcaaagcccatactccactgacacactaatgacagccagcgacatctgtcatttataatttcaacctagctttttctgaatgtgtatagaatcgcttttctccattatgcgctgtttctgttgtgcatgctaactctggtgccatctgtgttagtggttcccagtgtctcagagagcagactctttgccaacaagcaatgcctctcactcgaggaaaatgacataatcaaatcctgtttttttcataacccacctgtgagtggcatgttactatccatgttccgtgttattgggacatacggaactgaagctctggttcaagaattgagttaaggtgttctggcttatagtaacgaaaacattatttcaggcaattagcaaaacttgttaatgttccaaagaaaggaatatattaggccttcaggatggagccagataatgtctagaaactcagaaagaaagaaaaatcaaaacttgccctatattgagttttaatctttgctccttagagcttcagagaagtatatatgtatgataaatgtacattcacatgtatgttctgtttacatatgtcctgatgcctttacacaccattggtcatttttgtccttgtccagagctttgtcaatcaaatgtgaccaagaattcactgtaatcgttctctttttttgtgtgttttgtttttttaggtaagtattttgatatcctactttatcaatgctgaaagaaaaaatgcacctgcctgatgtagaatcaatggcttaaaacaaaatagaggcaccagtgtgaatggtaaaaatggatgcactcctgctgctggtaagaatataaggggcattcagatgagttggcttttcccaagggagctggcagtctgggaagacggggggatgggtggggtggattgttgctgcgccaagtacaaagaagatgctaaggaatgctcatgaaacgttcattcacctcttctagataaacagtcctgttctaagatgggtgtcgtgtccatttctcagctggaaactatgctctcgaatactatttttacacctttcccagataaaaacaaatgtggtcatgttcacgacactcttttcttcagtctttgtctttaaaggggaactaaggtagaggaaatagatttactatttcattttcatttatacagctctgttgaaacttaaacacgtgtggcatgtgatcatgactatggagataaaagctccatccagatgctggataagtgagaggaatggcagcactctcaaaagactcactcctctgttctttttcccttttttatacatggtaacttctgcatccatgttaaatatgatgtgaaatgcaattataatgattcagtgctattttgctctgacccatagtcatttttgtagatacgtatttcaagattttaaacatctatgataaacactgtgctcatgctggtaccagaatagaacttctgatactaatatattatgtttaatataagttataaatgatcctacatgaatgaaaactttatatattagaaatatgtttaacattgaggatgaacaagttgcaaaggccaaaatatttctgagacaaggcccagtggctaaatggagttctctccaggttacattggcctcatcaagtttcctgccctcttaggtgtcatccacctttccattatccagctgttgattcaattcagacagcttctgatacaaatccttccgcaggagtcccaacacaaactggcatatccttgtcctaagacattcttcagtagaggacatgaattcttttgctatagttgctataataaattaccatggactgatgatgtaaattagaaccatttacttccttgcagtcctgaaggttagaagtctaagagtgaaatgtcttcaaggttggtttccatgtaagtttctctccttggaaagcaggtgactgtagtctccctagacctccgggtgcctgtgttgggatttctcgtaatataaatatgaattcttctatgttaggttctatgctaatgacctcattctaactaaatgacctctttaacgcactcattactacataatgccaggtgacatgtggccatgtttcagttgaggactgagtacgcacagtggttattcctaaatatatatcaccagttactttcttaatttcgctaggtatgatatatgaacaatcaccaaattttctaacagtgcttttcttatatcttcatcagtaaataaagcatagtagaataagtgtcttctgaggttcacaggtataagactttagtgtgtaaatttgggggtgtgcagtttactctgttaacagtccacacattaggtttcttgcctaattcttttcaaaccattccatgtgtatcattctaccttctgaagctagaatcatgtctatccaaagtaaagactgatcatattttgagttttattatttcatgggctcatgcaaagtacagggagggctgaggcacgtgatagttagcacgacgcacacatcatttgaagatactgaaactgttagtgaaaggggagaccagatgagtgtcctttaatcacttattgatgacatctgctcccttattttcacaaggaaaaaaaaaaacaaaaataaaaccacaagccccagattaggcagtgctccagcgaatcatctcagatccattcctgtgagccaatcagcagtccagtcagcagagacaatctgacctctgcacccgggtccaagagacgagggcactgaagtgtgcatgcccccaagaacaagtcaggctgcaagaaagtagctacctaatttagggacatctaaaggtcaggtggggttttgtaaggaaacattgtgaacatatttgtgaacctgaggtaggggatggaatgttctagaactcaaactcaagtcctagaaatcatattttaaagtccttaaatcatgtctaatactctaccaagtctaatttcacacagcctagcacagtacaagataattattctaactaaaatttcatcactgaatacttgattctgtttatattggccttattcagcttcttttattatccataaactctagagccagcatccagagcatattctctacaccctagagtaggatcaccctaactcatgccatattggtgctcctttaattaaattataagtatggttttaccagtttatagaatatttcaggataatgtaaatccagtcaactttaagatgattatttcatatagattactggaagtgttctaggattaattatttcacctgcataatctgggattctctacctggaaaaatgggaacagagtttccaccgagtgctctatggtattaaattaaagtctacaaaaacattaacccagtcctggcaagagactagaaagggtgaacgttggtttgtgtgttgctgcctccctttcccccttgaacatggcacaatcagcgccattctgttcccattccatgctacatagtaaataataacaagaagcagtaatttaacccacagaaagaaatgggcactggctgaaagctccaaagttttatgaaaaattagtgcagtcaagtgttatgaaagcaaacgcatacaggtgctagggaactgggtaacatggaggcctgtttttgtgtctgatgatggttgttgttttgtttttgttttctgtttccttggctttgctttgagacagggatttactttgtagccctgagcagccttgtactcacagagatctgtttgccccaactattgggatgaaacggacactacactgtatgtgaaaggtggcaagaagcactttgttagtatgtaagaaagaacaagagcctgagggtatttcgtgtacatgagtgagcatatgtacacatatgttcatgtgtgttcccttagtgatcatggctagagtgaaggtggcagactaggagaaaaagcaaactaagtaaaaggctgagtgcctggggatagcatgcacaagggctggatgtggaaagccacaggaagaggacagcttgctgaagaagacctctgtgactgagatgaaggacactttgcaggatgacgctaaagaagatgcttaggaccagcagagatgcagccttatagacgttatcagggagttcgtcttctatccaaagaacgatagtagctgccattgcttggtgggtaaaggaacttgcttcccagcctaacaagctgagtttgatcctggggatcaaacacagaagagaactgtgccctgcaagatgtcctctcagctcaccggacacatgggttgtctctgtctctctttctctannnnnnnnnnnnnnnnnnnncatatacacacactagcatgcatggacacacacacacatgcaagtgcagatacaacctcatacacacaattataaataaataaaattgttactataataaatacataaataataataaaaattaaaaaattaaagacctttttaagtgagtaccaagaaggcaagccagaaaaaggcttagcaggatggaaagtaaggcccgtacatattcagattcatgctttgaagccgggcgtggtgacgcacgcctttaatcccagcactcgggaggcagaaacaggcggatttctgagttcgaggccagcctggtctacagagtgagttctaggacagccagggctacacagagaaaccctgtcttgaaaagacaaaaaaaaaaaaaaaaaaacaaccaaaaaacaaaacaaaaacagatttcttctttgaaggcttttctcctttcttcgattttctccttttgctgagatgtaaattcatagcatgtgaacttacagcacacacattgatagttccttatagatattcttgctgcattatctttgcatgtgtcctaagtggcctgagatcctttgacatcccaaggtgtcaaagacactgtgtccaaagtaaataacatccggaacggaagtggaatgaaatatctacataggactgcttgcttgattctcctagcggagtctccctgacacactgctctcttgacttggcagagcatttgcttgctctactgatgacaaacccagaggatgacatgattgtgacaatttccttgtagtgactttgctgtcatggatgaacctttctttgcccacacactgtaagagaaagtcactgattgagtctaagcggctttagtggctgcctttctccaccctcagaacagcctgggaatgacgttgccatccttcacaggtcttaacccagtaaaacttttgctctgtctctttagcaactagccttacttggggtggtgtgtttgtgttgatttaaccatgccttccctctgggacaaggaataccacagtcagtgaagattcagaccagaagttcaggtcactgggagaatcccacatggtaggcacctgtatgtcagcaagaacactcctgttccaatttaatgtggatccgtcttgctcctatcatttctactgtcttctttctgactcttaatttatagaatctaatggacaaatgtgttttatcaaatttcaataaaagatccctaggtgaaccctgaactgtgttatgtacactctagccataaaataaatactcactgattttagtgactaaccacggagactgtagttcttacatatactcaaaaggctctgcatcagtgatacaagggtctgtagatgtaaaatccaaataaatacttaacaatggaagttctgcctgcacaatgatctcattaacagggatttgctctccttgctcttcctacctcttctgttatcatactgttataatatgttgtctatgatacataagaataataatatacatgctgtctataatagtaagggttctatatatccaaggtgcacagagaatgggttaagacttaggctttgagtgactcactactcaagcagtcatcagaaaagagaggcttctgctctaagtcctgctccagtcctcctgcttcttcctcttttagggaaaagagaaacgggaatcttctgatggaggtgcaggcaagcctcttggtttctagactacaagatgtcatcatttgtaagagtttactaggaaagccagggccctggacacctcaggaaacatgggggaaagcccatgcaaccaggaaacgggcattatcggggaaggcatccccagatgaaggaagaggggtgcagccaactgtccagacgactcagcatgaggtagcgaggtcatgctggggtgatctcacccaaggtacacctttgggtaaatcattagtcatgagtaagcttgaatagtaacagacctcatggcctggcatcgccttgctacttggtggcccctgtttaatttcctagcacagttggcttctgcaaatccttacttagtattgtcttatcctgctgtcttctgtcaggacaagataatgaaaagcactcctttaattaacatctctgtgtattttaattgattgagaaatttcgttataattttattaagagaaagttgcaatgaaatttaattcacttcctatgtcttttttttttaatatttgtattcctttgcgattcttatccacttagtgtatgtgatttttgctcctcctgcctttcacttttggtgtttttctaaatgtcttataactcctccacagttgtcatgttcccgtatatctccttccagccatcttatgtaaggccacacctgctgaaggtctttcgatgatgagctgaagtttatccggtcatgttagttactggctcttagctttatgcctttgtggggaaatcacctaccatgtgtcttagggaagcagggggctactattgtctagtctgagaacactgnnnnnnnnnnnnnnnnnnnnnnnnnnnnnnnnnnnnnnnnnnnnnnnnnnnnnnnnnnnnnnnnnnnnnnnnnnnnnnnnnnnnnnnnnnnnnnnnnnnnnnnnnnnnnnnnnnnnnnnnnnnnnnnnnnnnnnnnnnnnnnnnnnnnnnnnnnnnnnnnnnnnnnnnnnnnnnnnnnnnnnnnnnnnnnnnnnnnnnnnnnnnnnnnnnnnnnnnnnnnnnnnnnnnnnnnnnnnnnnnnnnnnnnnnnnnnnnnnnnnnnnnnnnnnnnnnnnnnnnnnnnnnnnnnnnnnnnnnnnnnnnnnnnnnnnnnnnnnnnnnnnnnnnnnnnnnnnnnnnnnnnnnnnnnnnnnnnnnnnnnnnnnnnnnnnnnnnnnnnnnnnnnnnnnnnnnnnnnnnnnnnnnnnnnnnnnnnnnnnnnnnnnnnnnnnnnnnnnnnnnnnnnnnnnnnnnnnnnnnnnnnnnnnnnnnnnnnnnnnnnnnnnnnnnnnnnnnnnnnnnnnnnnnnnnnnnnnnnnnnnnnnnnnnnnnnnnnnnnnnnnnnnnnnnnnnnnnnnnnnnnnnnnnnnnnnnnnnnnnnnnnnnnnnnnnnnnnnnnnnnnnnnnnnnnnnnnnnnnnnnnnnnnnnnnnnnnnnnnnnnnnnnnnnnnnnnnnnnnnnnnnnnnnnnnnnnnnnnnnnnnnnnnnnnnnnnnnnnnnnnnnnnnnnnnnnnnnnnnnnnnnnnnnnnnnnnnnnnnnnnnnnnnnnnnnnnnnnnnnnnnnnnnnnnnnnnnnnnnnnnnnnnnnnnnnnnnnnnnnnnnnnnnnnnnnnnnnnnnnnnnnnnnnnnnnnnnnnnnnnnnnnnnnnnnnnnnnnnnnnnnnnnnnnnnnnnnnnnnnnnnnnnnnnnnnnnnnnnnnnnnnnnnnnnnnnnnnnnnnnnnnnnnnnnnnnnnnnnnnnnnnnnnnnnnnnnnnnnnnnnnnnnnnnnnnnnnnnnnnnnnnnnnnnnnnnnnnnnnnnnnnnnnnnnnnnnnnnnnnnnnnnnnnnnnnnnnnnnnnnnnnnnnnnnnnnnnnnnnnnnnnnnnnnnnnnnnnnnnnnnnnnnnnnnnnnnnnnnnnnnnnnnnnnnnnnnnnnnnnnnnnnnnnnnnnnnnnnnnnnnnnnnnnnnnnnnnnnnnnnnnnnnnnnnnnnnnnnnnnnnnnnnnnnnnnnnnnnnnnnnnnnnnnnnnnnnnnnnnnnnnnnnnnnnnnnnnnnnnnnnnnnnnnnnnnnnnnnnnnnnnnnnnnnnnnnnnnnnnnnnnnnnnnnnnnnnnnnnnnnnnnnnnnnnnnnnnnnnnnnnnnnnnnnnnnnnnnnnnnnnnnnnnnnnnnnnnnnnnnnnnnnnnnnnnnnnnnnnnnnnnnnnnnnnnnnnnnnnnnnnnnnnnnnnnnnnnnnnnnnnnnnnnnnnnnnnnnnnnnnnnnnnnnnnnnnnnnnnnnnnnnnnnnnnnnnnnnnnnnnnnnnnnnnnnnnnnnnnnnnnnnnnnnnnnnnnnnnnnnnnnnnnnnnnnnnnnnnnnnnnnnnnnnnnnnnnnnnnnnnnnnnnnnnnnnnnnnnnnnnnnnnnnnnnnnnnnnnnnnnnnnnnnnnnnnnnnnnnnnnnnnnnnnnnnnnnnnnnnnnnnnnnnnnnnnnnnnnnnnnnnnnnnnnnnnnnnnnnnnnnnnnnnnnnnnnnnnnnnnnnnnnnnnnnnnnnnnnnnnnnnnnnnnnnnnnnnnnnnnnnnnnnnnnnnnnnnnnnnnnnnnnnnnnnnnnnnnnnnnnnnnnnnnnnnnnnnnnnnnnnnnnnnnnnnnnnnnnnnnnnnnnnnnnnnnnnnnnnnnnnnnnnnnnnnnnnnnnnnnnntgtgtgtgtatgtgtgtgtgtgtgtgtgtgtgtgtgtgatggaagtgatagacgtgtgcatgagttcatcacattgttgactgaacatggtacttttgtgtggtactctttttagtaggaatatcatctgccatgtacaggaattgggaacccaagtatttgagaagaaggaagaaagggtattttgctgtgatccttagggaaactcggagatggggctgcttaattgttgccagaacttaaatatatacaagcaatgcttgggctgaagtataggaaaggttggcctgattcccgtagcctttctagattacatgatcagcccatggccactagagggaaacagtgtgccctgtattaaagtgcttatcagccttgctacttttgttactatctgacactgacagattgatatactgagtagggaatttcctgacatgagtcaagacgacttcttaaagaagaaaaaaaaatctaacacatctctcaaatttatgcatagcttccagagcagagaaaggctgaggtaccacctaatgatggctggctttcccactaagtgggatgttcttaaagtctcttccaaattgcctcaaaaatgctaatgagttggcactaacagatcatttacatagtcagaatagagctttttggctttgcatttttgtctcagaataaaacagaaatttcatggctctagaaatcagcctggtacatagaaccagagcactgggaaaataactactagatggcctgaagcatgtagcagctgaattccattactcggctgctatttgccaaaggggtgtgtgtgtgtgtgtgtgtgtgtgtgtgtgtgtccgtccttcagtagctgaggtaagagactccaatctcaatcgacttctgagaatttttagaaatgacgtgatataaaggtgaagtggcttgaagaaatcagctgtaccgtagagttcctcactaggaccttgttcagactgagaatggacatcagtgggaaggcacagagtgagcggcattttcctgccagggcaccaccagcttccaagactatcaataatttcacaagaaaaccggagtgcacccagcaacatcgcttaacaaatccaccccaggtggctcagtttctgttctgtggctgcaacgagacacaaaacccagggcggcttacactgtggggctaggtttggagggagaaagaggagagggttaggtgggaaatgttgccattgtgttataatctcaaaaaaaaatgtaaaaagcatttaatcaaggacgtccttacaacttcagcaggagagtccatggccaaggaaacatggtagcaggttgccactggaacatttgctgagagcctagttctgattcataagaggcaggaggcagaaggggcctggcttgagcttctaaaacttcaaagtcaacctcccactagtgacacatacctcttttaaccagcccacacctcctaatttctcccaaacaagttcaccagctggagaccaagcatttgaacatgtgtatctattggccattcttattcaaaccaccataatcagcaaagaataggagtaaaaaccaagcaacattgaatagcagacccatcccaggtcagctaggcaatggttggaaccaaatgtcgttccctgagtgaaggcacatcagctacgggcatgaactgcatctagtcccagcatttaggtgtctcagtacattgccagcattgctttccaattaggaattttcatattgggaaagaagcagagcctctgaacctgaattttggttcagcagaagcatgaaaggggaaaaagtagaggtttgtaccacgggcacccaggaaaaggggtttattgtcattggcatttgcaaacgacttcttttcaggttctctgtatttatccaaagtaaacagagttcaggctcagcactgtcaaggctgttctctggattgcagatgacactgcacgtgctgagaacattaaagtgtgactgatacaaaggtaacaataccctggtgtattgaaaatacagggaacttcccaaccgtcactcctttagcactatgaattagggaacaccagggtagagagacttcgcaaatcaaagctcagagcactagaaaagaggccctggagaatggaaatcagaaaacaaataaacaaccagacaaaaacccctcctcagtgtgcacaaagagtcctggggcatggcacagaaacccctgcctcactcaacagccagagaatcctaaaactgaccttcaaagctggcgaaaagccagcgaagatgccatcttattttacaaaatgcattcagctctcttgcacttctctaaaatagtgccagatgaaggtgaaaaggggaagctcgggcaggaatttcacatccacaagatcttcccaatgtctgtgtcagggggagtgtccagactgatctgggctgccaaggtggtggagcagctcataggccttctatttttcagacaggtcctttgacatcagaagaaattggaaaaaaaaaatgctgtgtcctgcacagcatgtggaggcaaggtagaagaaatcgagggaaaagtcaggaaatgcagaagtatgaatgatagaaaaatggcttctcagataccagaaacattggtttttagaattcaagatcatgttgatctgagcatcacttatggcccgagcagtaggatctacagcctgaagttgtatgtggtgctgggtaggccaggttgcagcactgcagatgtgcagttcaggatacaggacaggattcatggggaccaaaatcacaatcagcaaagaggaggccatgtgctgcttccagctgaagtttcacaggattgtccttcctggcaagttaattctatccagaagaccaataaagttgcctcagagaaggaaagaaagagagaaacaaaaacaccaaacaacaaatgaacaaacaaacaaaaaatggagtaccttcatgtccccacccaacccctaaccatcctgtcccatccagtccagtctcccctaccctgaccctacctcaaattccagagtcagtttgctccaatggcttcacaatcttgacctcaactacaaggaattactttttcagtaagtttagagcactgatgccactcatcagtggctcggatccttcagtgattcctctatacaacataccatagtgctttgctcgttagcctttttgttctggatccaaatataaagaaataaaggactacctcatcttgagaagacctcatctttagaataccccatcttgagaagaagaaacggtgtatgggatgacggtgccaggaacacagtaacttttgaagtttctgctcttaagtatcgcaactacgtctcagctgtgatgtgctgggtgacatgggtaaacacggggttgaggtgtataagccaggaagcctaacttttgttcaggaatgagtccagggagtcattggatagtttaaatatagcacaacctatgatgttttctgagttaaatttttaattgattaaatgcattcggaatgctgtcaccagacatagccctgatattacttcctcatccttatatcattcttcattttatttacctagctacgctttccacctcacacatcacagtagggctttacatagcgtgctgtccttacttcatttgtctctagattttagaagacaggggaaatatggcactcatctatgtggttgttgtaaaacagatagctcattgaacatttattgactgttcatgagttacaagataagtcagagacagtagatttggtccttcctctgtttattttttctaatacattattaagtcttgtaagaggggtgaaaaccccggtggcatttgaaagaatgatttgggggctgtaagatgggaagcattggatagacaaatccacagaaggtaaacacagtagactcagctgtactattctagttgactgaagatagatgtgtgtgtgtgtgtgtgtgtgtgtgtgtgtgtgtgtgtgtgtgtgtgtgtgttctgcatatgagaattcatataacttcaagtttagataacaccaactctggcactcattgcatagaaccagagaactgggaaaataggtttttttttaaattaatttatcacatttgatccactgacaccaacactagccaaactattactattacctcacagtctggtgtctcctttttaatcaagccccacccaccaaaataaaccagatcttttcttacattgacacagatgactccaagtcactaaaggaatttatgaaccaatatctagttctctgcttctaattcgacattttgttgggtgcatatgtattcattaaattaattaagtaaaatctccttcaccaaagtatcttaggagagtatcaataactaactttacaaattaaagggcttactatgtctgttagttaaggttttattgctgtgaacagaccatgaccaaggcaacttctataaaaaacatttcactgggattgacttacagggtcagtttcagtccattatcatcatggcaggaaacatggcagtgtgcaggcaggcactggctctgaaggagctgagagttctacctctttacccataggaagcccgggagcaaactgtcttcaggcagctaggagtagggtctcaaagtctactcccacagtgacacacttcctccaacaaggccacacctcctaataatgccacaccctgggccaagcatatacaaaccaccacactatgtcttttcaaatgcataaggcaggagagaatgggagaaggggtcagatagaaacagaactgagtgaaatagtgtgtatggcaggggcagggggaactaatgcatacctggacctttactttactgtaagtcttagacctggcagtatcacactccagaaacttctagagtgtttctgttgtaatgatgtctcagcaagataccctttggacttctcttttggtgcatttgttacatgttttaattccatgatggcaattctccatctgtgaagggatatctggttctttgaggtcgccaagagttctttggcaataaatctatgcttaaaggggatgatccagttagctaatgccatttggggtcaacatagaaagtaactatcttgatctcccagttgacgttcactactcagctattaaaaagaatgaatttatgaaattcctaggcaaatggatggacctggagggcatcatcctgagtgaggaaacccaatcacaaaagaactcacacaatatgtactcactgataagtggatattagcccagaaacttagtatacccgagatataagatacaatttgcaaaacacatgaaactgaagaagaatgaagaccaaagtgtggacactttgccccttcttagaattgggaacaaaacacccatggaaggagttacagagacaaagtttggagctgagacgaaaggatggaccatctagagactgccatatctggggatccatcccataatcagcctccaaaagctgacaccattgcatacactagcaagactttgctgaaaggaccctgatatagctgtctcttgtgagactatgcaggggcctagcaaacacagaagtggacactcacagtcagctattggatggatcacagaacccccaatggaggagctagagaaagcacccaaggagctaaagggatcttcaaccctataggtggaacaacaatatgaactaaccagtaccccccggagcttgtgtctctagctgcatatgaatcagaagatggcctagtcggccatcagtggaaagagaggcccattggacaggcaaactttatatgccccagtacaggggaatgccagggccatgaagtgggagtgagtgggtaggagagtggggtgggagggtatgggggacttttgggatagcactggaaatgtaaatgaagaaaatacctaataaaaaaatgttcaactgtaaaaaaaaaaaaaaaaaaaaaagaaagtaactatctaaaggctgtcttcttatgcacactggaaatatactgtactatttcctcaaaatatgcccccatgactttaagccctcaggacattcattttcactcaacaaacaggatctttttatccactgaaataaaatgtttgggaaatactagtttgaatttgcaatgctacatctaggttttgaaaattccttcatgctatttcatagggattttacttcaatgactataaggaaaacagcctatagattataagtattgtctatataaatatttaatacaagttttctatttgttatatgatatgtgtaaatatagcacactggtaaaattaaaacttttattgtgcttaacattgaaagttttcatactgtgctcttaagcaaatgcctgtgttgtattatatagcggtgagtttgtgctacgccactttgtgctcccagcaggtcacacacatccagtcacccactcaggaactctttgtatttgtgaatgaaagacacacatatacacaatagcttattttttaaatgccttggctaatgcaatgactgggcccccctaaaccttcccctgctacctcaggcccaatcagtggcctctgaccctaattctcacgtggctggttgtctttctctcccgcagctcctgcattccatccttcttccccacctggtctcctctgctcctctctgcattctgccagtgcagctcaaagggtcccaccctgtgcccagtcattggccattggcatcaatgttgattgatcaaaagtcaactggggacaaggacctttagcatttggacacaccgattcccaagtgaatcaagcatcaaaaccaatctccaacagtattaaaaatctaagttgtcaaaatgtattagatcaacctttcagttataggggttatctttgagccaaccggtgggaattcctttttttatctaaggtgttagtttcctttctgcttctctgataaaaatactatgagaaaaaacaacttagagaagaaagggcttgtgttgcctcacaattgcagggtgatagagtccatctcctgcaggaaatgcatgggaacaggcagggtaatcagagcaaggtgctgcatatgcaattacacgtcatttgcattaacaagtagagagaggtgaggcagggttctaaagctcctccactgagtacctgctccagcaagttctgcctcctacaggctccataacctccccaagcagcaccaaagataaggaccaagtgttcagacttgagcttaatggggcacatttcgtatttaaaacaccacacttcatcaacagccagcagtgtgtgaacaagtacctgaatgaggggagttagtaacaaaaggcgttttaaaaatctctaccatgccatgctttgtttttttaattttttaaatgtttaagttatttacattgtgttttactcattatacatggtcctatgttactcaagcacattttagccattctttttagatattatgagctactgtattgtgatgtagaaagtagtattattattccaaggtgtttgtgtcatcttttcattcatacacacacacacatatatatatatatatatgtgtgtgtgtgtacatacatatacatatacaatatttcattcatatacatataatatgctatttatactatatacattttatatagcaaatcttctatatattttatatatgtgctatatatgtattctatatatttttattatatatacatgcactatatacacacactatatagatatagatatagatatagatatagatatagatatagatatatatacacacacactacatgcacacacacacacacacacacatatacatattatataggaacagctaagcaatataactgagttcccaagctatgcaacttttttctaattagtcttcattatttaagctatgccttcatgctgaaagtactacctgaaaacttgtcatttgtcccatgtgtcattttgtctgcatggtatcttgtaagtttgactacatcaattgctaatactaaggccatgtggacaatcattttaaattctcattaagtaactgattgcctatacaactacagacaaattacaacaggatgtatgttcaagcagttcaatctggatgggaatcaatgtgattacataaactgtcatcagagccttttgacatgtcacactaaaaccatatcaacaatctacctcagtgcctttagaaaagtatttcctgagattaaacccaatgtatttcttacatatatgaaaaaatgttccttcgagtattttatctttcactaacttaagctgttttagcatttaaatgcaggtctatattaatgaataaatactgatttttaataatatggtgcatgcatattgatgctcaataaatcagataattctaggacaactgatattcaagttaactttaggtcactggtgggtgtgatagctgcatttcattctatccacaatgctaatattatgataagaatcagaccaggcaatagaaaatttacttaattcccacctcaaattcaagccaattttaatttgacttgacatgtattcacgtcaaatgatgataaagccaggaaagaagtaatgatgttcagaatatgtgggtcttgtcatactgggacatatctatgcccagaaagtggtctactctttgtattgtggtggggaaatctcatgtcttagagtctataaatattcaaaagaaatcaaatttaactcatatgtgacattttctacattcattaaatatcatatcaaatggaataattaagaatatgttgggtgtgcatgaatctctgtgacagaaggaacacggtcctgggagtctgtaagtgacaggagccatgttacccagcccactctatatttgtttcatccacccacttgtttcccatcatttcctgttcatccaaactggacatgcagagctgcatatgctgggagctctgtactgtcggcaacactgcatcccagacagatggggaccagaaaaaagttgtttcctcattggggtggttctcaacctaaaacagtggttctcaacctatgggttgcaactccttgggcaaacctctacctccaaaaatagttgcattaggattaataattagcctgacagtattactgaggctatggaggcagtgctcacaaaaaggacctatcatgactgtaccccgaaagacccaacaagcagctgagtcagatgcagatttttgcacccaaccaatggacagaaggtgctgacccctgtggttgaattagggaaaggcagaaagaagctgaggaggaggatgactctgtaggaggaccagcagtctcaattaatctagacccctgagatctatcaagcaccggaccaccaaaccagcagcatacaccatctgatatgaggccccaacacatatatggcagaggactaccaggtctgtgttcattcagagatgatgtacctaaccctcaagagactagaggccctagggagttcagaggtcatgtggggtagggggtggggacatcctcgtggagagaagggcttggggaggaggtatgggatgtggaacagtctgagggtggactgggaaggaagtaaaatctggagtgcaagtaaataaataaataaaactggaaaaaaaggattaataattagcaaagttacagttatgaagtagcaaggaaataattttgtgagtgtgggtggttgccacagcattgtattaaatggtcacagtatcagaaaggtcaagaatttatgctttaaaggaatcagtgctggtctagaatgtccctctttgttctctgccctgttgtctcatgttatgattttccccattacacatttatgtcattgtgacaacataagatgcttatcagtgctggggaggtgacattgaacctccaaaactcacaatcctttcccccttttaaaaagcaactagctttgtttatttcattgtagcaatcgaaatgaactgatcatgcaaatgaagactgccccacccgccaccccacccccaggatgtgagcttgcatctgataggctggagttgactactatttactgtgcatatgtgttgaaatgccacatcctaccccactaatatgtataattaatatatgataaaaataaaattgaaaaaaaccaccaaactttccaaaggatcaaattatttatctcattctattgcaaaaaaataaatattatacatgaatggtaaaagacaatgtcccttggctattatgagcttccgagcagtgtggcacttgctatagtagatgcttcctatgaagaggggatcacaccagaaagtcagtagagagtgggtttagccattttgctccttggtgccaatactttagcctttattcttgtcaataaagaaaaaagttactgccctgctctaccactcaacaatgtttaactgttttcttttgctcttgtgttttctttatacaaactcagtcgggtgtctttttctttcctatttcttgccttctatatagttgtatccaaaatgtcaggaggaaaaaaaaaaaaaaaactatactccttagttgagcaggataattgctttagaatatgtagtgagaaaatacaagcaaaggtcaaatactgaatgtatctactgtgctaatctacatttgtgctttagaaagcacacgtcactgaatgatttaaaatactctcgtaccatctgttctcttggggtttaatactgtctgtgatagcaaaataatcatgttaaatacattctagatataggaccctgctgttcataacgggaacggcactggtaattcagacgcccttgccctttctctttccgtgcaattacaccattgattttcctgtatttgaaaggagaacaacacaggacatgtttttttcctaagtagaacaagcagtccaggaattctgccatttcttttagagaagtaatagagaacacattaagtaaaatgtgcagacatgtgctgtaaaggaaacatggcgtatgattggcgaatggcgtgtgctgtccggcatctttgtgtcggctctacgaaaattgatcaaattgtcattcatcgtccagaagtcacgtgatcagtttcagctcagagattctgttctgtgcttggcacgacagagtgtgaggatgtctgtgcaaatggaatgagattacttcggggataatgttgatggtcccccgaacccttgtcacgctctgtgtctgaatcataaactacagactgtttcacgatgactgaaaatttatttacgtactgaagcactgtatactccccccaaaatgctgtacacttagtgagaataacagccttttcattctccttttgtgcctctttttgtaagggaaaataataattttaaaataataataattaaaaggattgatagccaatagtgtacaattgtggccaatgataggttctaaccacgtataattcatgtgtgtcggtccactctccttagcctgggctggccctgtgtggtgctccctagcaggaagtgttcagagggtcgctgttgagcagattttgagggtatccccagtacttttgagctcccagtacttttcatatttgccctcccctctcaggcatctttggctgctacatgtatcccatctgcttcttttattttaattgcaatttagaaaaatctttcctggaagaagacagaagtcaggagacatcattattctttgcaaaaaaacgtctccagaatggtcattaaatcaccctgtcttctcatcgccaggccaacagtgccatttatataaatgctgctgtcagtcacttgccctctccttgaattgtctctgaccaccactcactcttcccctgattgtgttcttgtttatccaagaaggctacgacagagtgaactcaagaacgtgtgcattggaatttgtccttttttaaatatagagttgtttacttcctgatctgttatcaacttatatatccatatgtactcaatacttgatgttagtaagccatatgtgtgtgtacatatgtatatatgaatgtgtacatatatgcatgcatatgtgtacataagaagatatataaatatatgtatataaaatatatgtgcacatatgtatataaatgtacatattcctgtataaatataaatatataaataatttgtatgaatatatatatgattatatttatatttggggaggtacttagaggttaagtatagggtcctggaaatgttagagaagccttctaccagtgagatatatccccttcttacagactgtaattcaaggcttttttttttttttaactttctactttttcctttgagacacgatttcactgaattgctcatccttgtcaaaagacactcagttacccaggcaggacttgaacttatcatcttcctgtctctgacttccaagttccagggattaagggtttgtgcaccagtcccatctggaaacaaaatcatgttctcagcgcccagtttgtgttttctctatcagttacatcacttgtctaaactgattcttcattcaaaaactcactcataacatcacctgtatgaaaataccataaaaattacgtactttcatgtgggaaaggtaattgtagggtctcttagtgtataaccatataatggtgacttgtttggttggttggataatctaggtggctatgtgtgtaactggttgaacttcacaaaggaagaaaaccaaggaagcaatttttctcaatggtcgctcattcatccatgggacaaacagagaacgaggccttggaaggggcagtgaaaagcagcagtcaaaacccaacatttgctaatgaaaataaccaagagttcaaggccacaatctgaatcaagaatgtgttgacactaccatgagccactttctccactatgaccgagagattgaagctgattctttctctctctctgacccgcaagactcacatcacacacagagtttagttctgatcctttaagagaaaccaacaagcaggaatcattccagagatgtgtttccaaggtggcgaaacctctggaaatctgcatctactagatgtgctagtacatgtctcagatctcggtgcttggaaagaggagacatggagcccaaatatggagcttcaaagttattactggtcacaaagcaagtgactttaaagccagcttgagctacatgaggccctgtcttttaaaagataagaaataaagaaattaaaaaaacaccaagtggtaaaataagggtttcaaatacaaagagtttcaattaggccatgtggcccagaacaaaaagtaaaatctctctctagccaaccacagggctctaaggtctcagattaaggaacagttctctgaaggttagatcagtctttactatttagatctgtacaaagataagcctggcactgagtgcagcagcgtgatgctgtggcagacactgaagctgtcttctccttgtggagtctttataccttgggagaaggcaacacctgagcaaacctccaactgggagaatcgattatgtgaaaaagccttaatatgacatctgacaactccaagcaaacgctcagtggacattttagctatacatatgattgcagtgactgtccatgaacatgtaacttaccacttgtctaatagtaatcaggaaagatgcttaaatttttcaaaagctgtttaaaggtttagagccagcttctgttgttaaatatttaaggtagttaatagcatcctgtgttacacatgacagatttaatcttaattgacatttccctcctagcctttatactctctcctacctagatttgagattcattcagcaaatttaacagaaaaactaaatctcaatggcttatattacattatctagtaactaacacagacatagctcatcaacaaagaagtggttatgacaggaaaaaaaatggctctcttccattaagtaaagaagatgacctcacaccagtcagaatggctaagatcaaaaactcagaggacagcagacactggcgaggttgtagagaaacagaaacactcctccattgctggtgggattgcaagctggtataaccactctggaaataagtttggctgttcctcagaaaattggacatagtaccaactaagaacccagctataccactcctgggcatatacccagaagacgatccaacctgtaataaggacacatgctccactatgttcatagcagccttatttataagagccagaagctggaaagaacccagatgcccctcaacagaggaatggatacagaaaatgtggtacatttacacaatggagtactactcagctattaaaaataatgaatttatgaaattctttagcaaatggatggatatcatcctgagtgaggtaacccaaccacaaaagatcacatatagtatgcatgatttatttctaatgattctaattacaacaatgaatttatgagtatatagcacctggtaggggacattactttaaagatccctataatatatccattaaatatttccaatgttttattttacctagactaaactaattaaatattatcaacatttgctcatatatccagaaaaatgaatagaaataaaaatacatttagaagaagaagaagaagaagaagaagaagaagaagaagaagaagaagaagaagaagaagaagaagaagaagaagaagtagtagttgttgttgttgttgttgttgttgttgttgttgtttcagttttgggacttctaaatcccagtaatagttaattctaagtcgctgaatttttctcctttgagcaatagagttgctgttttacatttgcacctactatgtgctaaaggcatctgcttatgtgttgtataataaatgttgctctaagccctgtacattctcctgctttcattcctctatatcctatttattcctttatgagtaagtcatcataggagatccagcctgcagtccttagctcatagcagtaaggcaggccctattcttgtcttcatcactgaaatcctccggctacctttgcttcttttctttctatcaggcatcacaccccatgtgtttggcctggtgatatttctgtcactctgtctctgtttaatcagttccacgaaagtgtggatacccgtctggtatgtttacttctgaaatcccaatcactaaagcagaaacttgacaaatatttgtgggataagtgaataaagttttagtatcaaagtaaataaatgctggaagcacccaaattctcccctatggctgtttgagccttttatggcagtgcagagttatgaactaaacccacatggtcatgaaaccaacaacttcgttcatgatctcttttgctattacaggtaactcatgagttgtatttcatgaattcttgacaacaaaaataacaccccacagctatatggattttattgcaaggggatacttcctttatggtctaaacttaagaggtgatccaggtcaatatttgtctgtatagtctccacgaggatccgtcttctacctgtgtttcttctctagacttgctcaatctcagagtttatcatgagtttttctgctatagtcccttgagtcatcaaaatttgaagaagaaatgataagaaacactcagtgtttgcttttgaactgcttctatccatgtggctaagacagccttgtaagtgtatacttcccaaggtgtttgatagccagataatttataatccatacagtgcttctgagagcagagggaggtaattttttaataacttccagctcaacaaatgtgtgctatctgggcaagctggagagcattgtcctctgctttaaaaaattaatgataaattataggtacgtgtctttttcttaacaaacatctactgggtaccaacattgtagtgagaaacatatgaaacactgtagagtgtagagcgatcactgagtatttacagagaattcaaagacaaatatgctgtaaaactacctaccaggtattttgtaatccatcccaggaaaaaataaaagatagttaaattataatgtaagacaaaacataatagaataggattgatataagcttaagaatactatccttcaaataagcccactctgctaaagaatatttcttcttctctcctaataccaactgaaattagttctctcctgaaacatttaactggacatgaaatgaattatttacatgtatttctatattttttcctcgatagacaatacatcatctttgagtatgtatacaaaatatatgttcagctaatgctggctggctcactaactgcagtagaatgaattaagagattaaaaaaaactatctggcaaacaaatatagagttgtgcttgccaaaggcacccctatttgctcaaccaacttgtcaccaaagaatgaacttatagggtgattatttttcatctcgtgattttataacaagaagacatttggttatttggaaacaagcttaaatcattttaattctttccactggctcccactgttgggaattcattaacaaatgaacactggcaacattttgcatcttggcgaatgttgtgcttttttatgtacgaaagtgtgggaagtagtgtaggacacctatcaaacatcttctcagatcctgttgtatatattaaacccagttgtttccacttccatacattctaaaggaaaacgcacccccaccccccgtttaaggtttaaatagctggtagcaaactgggagacctgcttgaatcaagacctgcttgaaacattagagaatacgcatcactctctttgcctgactgtgttgctacaatggtgcagcttacactttggactcatgatgctatgctgagacaaggctatttatacaaaattcatcctctgtgttctctcctcatgactggaaaattaagtcgccttatcaatccaaagagcttatgaacataataggatgctaacattccttaccagagtggtccagtcaccactttcagtgaaagacgctgatttagatgaaaatttccaacttccttggggaaaatatcaagggtgatttcccaacaacattattttgatagatacatgatattcacactgagacaacatttttccttattttggtgggaaataaaacgatttgaatatttttaattttattttatttgtaattcattttttacgctccatattccattccccatccctcccctcccatccttcaactgatccacatcccacacctcctccccaccccaccctgtctccacatggatgcccccaccctccacctcatctgacctctaaactccctggaacctccagtctcttgagggttaggtgaatcatctctgcatgaacatagacctggaagtcctctactgtatgtgtgttgggaacctcatatcagctagtttagaaaaacactgaaacaacttccatgactgttaactctttatctgcacttttggtatttctccccagttgtaaccattgtgcacacacagatgcatcatgtctgaaagctacatttacagaatggattaccaggtaattacagtgcctgatcacagatagataacaattcatagaagagaatttccttagtttttcaaaccctacttttaataagggttctctttttttttcttttttctctcttttttttaattagatattttctttatttacatttcaaatgttatccccttttctggtttcccctccgaaaatcccctcccccccccacacattcccaaccctcccactcccattcctggtcctggcattcccctatactggggcatagagcctttacaggccctaggccgttacctcccatagatgaccgactagaccatcctctgctagagccacaagttccaccatgtgttttttgttttttttttgttgttgttgttgttttttgtttgtttggtttttttttgttgttgtttttttttgttttgtttttttttttttttgattggtggtttagttccaaggagcactgggggttctggttagttcctattgatgttcctcctatggggcttcaaaccccttcagctccttgggtattttctctagcttcttcattggggaccttgtgctctgtccaatgcatgattgtgagcatccacttctgtatttgccaggcactgggagaggccctcaggagacagctatatcaggctcctgtccgcaagctcttgttggcatctgccgtagtgtccggtttgatggttgtttactaagaaagtttagtacttaatgtacttccaaactcaaaaggatttcatttttattcaaatgattgaatatctacttgaatttgtatttattgagtggaaatatcagcaataaggcaagcatttgccacttaacctctaattaaaactcatacacccccagctccctgagaaaagatatttgtttttgcattttagtgggttctttggagaagtagtcctctttgctcacaaatgttgaatatgggatatacactctttccagtgtgtctccgtggttgacgtttcgaatctcagaggttagcatcattagcactgtagaataggtgagaagcaatttgacagaagaggttaagagatctttgaaacataagcattcaacagctttggctgtcttatttaatatgctagtcaagaatgcataatgttggctaagaaagtgcaatgcacatacaaggcaaactgtatagtctgatctgatgtatggaccaaattaactgctaactcctaccctacctcctaatgttcatcatgactcaagatgtagatctaaatcccttgtgaaaaatgaacatgccagtattgtctaaactcacattactatgttaattacatgggttatttcattccagcaacactccccagaagctcagaagcagatggtcagcactagccatcttttagtactgttgtttttagtaatgatattcatgcttatagctttctaggcccaattgtcagtggtcagatcatttgctggatggtggtaatgctgaaaaccacaaggagggagtatggagagatgagtagataggaatcaaattacagatactgaatgaggcatctgtagggcttccaagtggaattttctcagcagtggttcatttaatagcaggaaggtatagactctggataaagatatgttttggtggtggtgattattttttgtttgtttgttttgtgttttgtgttttgttttgttttgttttgtttagcacataagtggtagtagaaagcctctccctggattccttgtccaggaaatgtagaaggcagaatcaccaacatcccagaacgttaaagggaattttgatctccagcttccccttagctggaaggaatctggagaccggccccctctccccccaaacccaaattacaaagcaggagacattactgagttggtatttatgccctggtgcagacatgaacagatgatgtccggctgtcctaaagaagttcccccagattctcccattgccaaattcaagccaggctggaagccaaaagaatcttctttagtaaatactgttgaggtcagaatacggtaaatcccgaggcctgaaattgctacttcttggcatctgtgttaattgctgtgctggtcatttccagcatcagagctgataggctgcagaaaattgatgttccgtggactgctgtgttatgtctgcctttgtctgaatgttctcaagagttcaggctaacagcatgatgaatgggatttatttggactccgtgcttataaccaatgattcagagtgtacagagccacatagaatagataggtcagccttgttacccttactaagagctgagctctggttttgctacaagcctgtttggactaaggctcatacctttctgtgagactcaattcctcagaatattttcattttctcaaaggtcaagggtccagctaccctgtccagtcccacggccaggacattctgttttcccagacctctacctgcataccggccagagttctcctccactccagactcttggcaagaggaatcttcaaagtaatctcttctcgtccccatttaagtacaactaatccccaggagggagtccctgccaggcttttggtaaaccattgcacaagtacaagcgaaactgtccctgctaagaattccacccttagaggatttacattctcatccagaaagttcatgtcttactcttcagtttctgatttataccctttgatggaaattttcatttgaaaatctactgcacaacacccttgaattatcttgcattcttgtgctgttgtggttaatattctggaatggaggaggaaggccaaaggccctcttaaacctaagggcattaaagtacattaaatggtcatgcatatttcaatgtaggcaggcattaggccctaccctcacatgatacaactggggacgctgccccagtatacgttaacattattgattattcatcaataatccatttctttatgccctggtgctttcagctttcagcttcccttagctttgtaggcaccgtagcaagttcagttgaacaaggaatctgtgcaatccctctgtattattgaggttcattgcctcaacgttatgtacattttctcacatttgcctgtgtgaaatttctcatatgcctttgtatgcatgtgcatgcagaggccagaggtcaacctcatctatctctcttcatgagtcatctattttgttttctgagacagcacttcttaccaggacatgtccagccagctctggggatctgcctatcttgcttccccaacactgagattgcaaagaagtgcagcaaacctaggtctttatgttagagctagggagcaaacgcaggtcctcaggctcatgctaccagatttagcaactgagatgtctcccagacccagtcacctgtctttaaactataaagaaatagacttgaatatcaattagtaatgcttggagtagtgtgaggaaattgatgtgtgtccacaggactcagaaaatgtgaactgccataacccattcagaagaaaatacatatgattttcatatagtatctcattttctgaaataaaagcacacttatcagaaaataaattgaaaactattttcttatcaatagacaccatgcttataagtatctaaaaaagactagttgaagaaatattaacacagccatgttatatgctctcatgtaaaaagcacttactagattgccatgctttgactagaaaatcgtccattaggtacacaaatgtgtatagattatgtgtgacaagatccaaattcccaacaacaaattaccccaaaggagcacgcacgcacaagcacaaacatagacatgcacacaaacacatgcacacatatgtgtacatgtatacatacatgtatacatatataagtatgtgcacatgtaatgcacatagatatatgagtgtgtttgtgtgttatatgtctgtatgtttgtatgtatatgttacatatgtttacatatatttgggaactttaagaaaaataaatatattagcaaacactgagaaaaatacaattaatgtgaaaaaagagaagatatttgtttatatatctctgtgtaatgtgatatgtctaaatgagtatggccgggaatggtagcaactatttatagtccctgcaacttagaagggtgagacaggtaggataaccaaagcctataaattcatggctagcctaggagcaaagacaggtaaaacatgtttaaaaaaaatcccacatcatcattttatagctcagaatatataaaataaaacaattgaataaaatcatctacatttttaaactctgaagttaaattgtctagtgtctgactttagtcgcctcattaaaagtaacttttgatatatttgatcactggttccaagacatttttgttgttgatcttgagacaaaaatctcactatattgccttggttgacctggaccaagctagcctggaactcatagacatctgcctgcctctgtgaattcttaaagaaattgtttgtgtaggatagacaagacagatcagatgtttcgatggctaaaggtgaatgaatgaaacctgagttcaattcccaggctttaactgagaaaagagagaactgattctcaatggttggttgttctcttccatttgcatgccatagcagcacatatatccttgtataaacacatacacagacaccacacacatacataaacacacatatatcacacacacaacacaaacataaacacaatacacacatacacccacacatatcattcaaacatacatgcacaccacacaaacatacatacacacaccccacacacaccttacaaacattcacacacacatgccatacacacatatgtgtatacacacatcatatatacaacatgcacacattaataacaaagcttcttaaaggatttcatatttgtatgtattcaaatcccaagtaagaattattgagacactgtcttcgatgtagctcaagctagcatcaggttcacaatccctctacctcaaccttctgaggggtatttcaagtgctccccatcactctctgcaggaaatcgtttttcaactgttgaagttgcccaatacgctacattcttgatgtcttggcttgcacacaagggcttacaggatttcactggagatgatgaatcttgaaagctgtgagcttgttaagcctgtaacttcatcataagactgaggtcgtgagcagaattatttgcaatctttcctaatttctccaacttgtcttttatttctttaaattagcaaaggcattgctattagatttttcaatagttcttcacccaaagagcggggagaatttacatatctgagtgttgctagtgaagggagaaatcggtaattggttcatgttatcacacatggacttcagctaataatttttctgtccctaagaggctgagttcactgccattgtgaatagtaagttatgaaggaaaacccacaagttttgatcctaatgattaaaaagttacccattatcatttccatgcgcccataccattttctaagtctttatagtcagtttaggacgatggatctgtaattgattatgctctgcctatcacatgtgtgcgtgaagtatatgttaacaactagctatttagccactagtacattaggttgccattctcttagacctaaataaaaatggattaaaacctgccgtctcctcagagggtagttccgagtggaaacaggcttctgccgagccacagaatctctcctacatctgctcagccaataattggctggagcacaactctgattagaagcaagcaacaagcttccgtatccatgaacagaaaacaaggtacagcatgtagcctccgggagacacccgtttactctcgaagaaaaagcagcacccagcgaccagagcagcagcatatggctgaaagccattatctgacatgctctttccagctttcccaggaatgctgagctggccactaagatttgcttttacttcctgatttgggatacaatgagtctgccaaccagctgtgagcacctaggtctggggaaggtggctagattccgaagcgcttatgttcacggatcaccttatgccatcaacaagccaattgatattaagccacagaggagacggtaattgcttcccttctctcggttgttgtcagtaaaagtgtgtttgctaccctttggtaacggctttggagatctgctgtactgggagggtccaggagcgaggttagttgttaaattcagcatactgagaaagctgggggaaaaattaacctgaaaggaaagctgacaaatattcttagtttagttgtttagtttggcaaaaacctaatccagtttcaaggtctgaggattttcggaattggggagcttgctaaatgccagtgttaccgtgagaatcatccaagatgatcattggaaaggggatttagcaaaataaaggatttgtttattagcaactcttattatgagatacccaatagcttcgtctctgtacttaatgcctgcaccctgtaataagcatgtgagagtaccacaggaagcacacatgttcatgtgcacactccagaagagagcaatagattgattgtttttttttcccttatcttgaagttgtgatttctagatctgagttccagaattctactaactcatacttccctcccgtcgtccaatgccttccatcccagccacacaagcaaacctatgctctgtggtttcgaagctgaggtcagtatttttagagcaagggtctgtgtgctagggggatcctttctgctcttgcagttggaacgctgtggcagaagagaggtgcctgtgggtaacacgtctgggattcgtccctctgtgttcaataaaattatcgttttagttggtatttagcaatgagctagatggtttgataaaaatgttcccttctccctgtgaatagcagtgctcctagttttacaaattctcacaataataataatttttagaaaggactttggaaactttggaaggcattacattttgtttcgactgtcattgccatcttccctttttgcctttctttttctgatcttctacacacatagaagtacatgcaagactcaccaaacatacacttgcccggatttgaccagtgtaaatgttataaatgtgaaggatcatttagattgtaacttttcttggtggaaattaggttttttgtttgttggttggttggttttctgttttggtttgttttatacttcagaaaggattaccttctgcccagaatatcaagtgtttcccacacagttctgccattatgtaaatttccagtgagccaacacctatgatctcttatctaagcttcgttgcactaattgtgcctcacgaccccagcaaggcactggcagttgtctcacagctgtgatgtaggggtgaaaactcaaatcctcacaagggccaaagccaagggtacatttattcccctgctccatcctgcccctggttttggttttttgcttaaaagctatcaccttttcatgtaagtcaatttatattttatataagttgatatatatatatatatatatatcctaaccctaaccctgatatatatatatatatatatatatatatatatagagagagagagagagagagagagagagagagagagactcgaaaaactcaggctattcccaattaattttatttatttttaaatttaaagaataaagccaacgtgtatttgtccaccaacaaagatacaatttagaattataacacacagtttaaagaaataacaaaaacaaaaataatcaacagcaacatgaaacgccttgatttatcttccctgagtctcaaaatgaaactttgagaaaccctatttgtctgattagttttgtaagtagttttaaatgcatgtgatagtaatcaatattcaggcatagtctgtggaatttataaggaaaacaaaatactagattgacctcctacagtcagttaaatgctttcgtatgcataactaggctcttctctttaccactctgccccacgggactgtggtcgggtaaactcatcctgaaacacataagtgggcaggaggcctgagaaggaaagaacatccaactcacaatcttttattcctattccttagctcagaaaaaacaaacaaacaaacaaacaaaaaagcctgaggttgtatgttttgaaaacttctgattaaaaaatagagaattatattaacatctcaaaactaaaagcaatcatttaaaagattatagagaaactactatacctgaggtgttggtaccccatggccctaggatcaccaaaatctacccaaggatgattggtccccttcaggatgcttgcctggactcttgctaagattagtaaacagaatccatgtagttatagttatagttagttatagttacatactaaggattgtattttttagcagataggaaatggcttttctgacttaaatatctaggaaggaagtaatgaaaactgtggaagaaagcagggtataaagaaaggggaaaaaaatctcttaaggaagagatgctctagcagagtggaacacacttgtaatcccagcacttgagatgcagaagcaggaagatcaggagttcaaagccaaccttgattatacaatgactttgaagatagtctaggttatatgtgaccttgtctcaaaaaagtgaaaaatcccagatgtgagaggttactcctataagtctagtacttgggaggttgggacactgggattgcaagaagttcgaagttagcctggggttcacagctaagttgaagcacatctataactaaataataagaccctaattcacaaaaagagaaaaaagagggaaagagggagaacgagaatgagggagggaggggggagtgaaataaaaaattggctatatgttgtttctgcctacccaatgaagcgtaatattgagttaatgaaaggaaatctggctttttagtgaaacccactggggttggggggatgaaatagcaatgtagtattagaaattcaaaatatagttccatttaaatccaggtctatcctcatcaaataatgacttaccgaaagagaagtgtattcgaacacagaaaaacaatttccatcttaaaaatcagctccattataagcacagccacatggtcatttcatagttatccatttttatctcaagtggcaatgaagacattatcaaggcagttaaagcacaagtaagtcttaattaagctcagtgctgacaagagtgacatctctgccatctggaattaccgtcatttgctgtatttataatttctaaaatatttaaggtttttttttgtctccacaaactctagagcactgtacttttaccttgcaaagcaaagctgtaacttttttaatttataaaattttagcatttcaattttgatacatagagacgggaagatcagttctcttggatagtcttccccttgagtttttatatgtttgagatttttccccatctgcactggcatgtccttggagctgcccattgttctggccttgcttaggtaatgatactgttgacatttcatggggactgctttctgtgcatacacaatctcacaccagctttcctggtcctctggctcttacaatctttctgcccttcccccaccctcttcatcatgttctctgagccttaagagtctgggctgtgtcgtgaatgtatcagctggggctgtgtgtcccacggttggttgttttctgcattttgacaagctgtggatttctataatgggctctggtgcaaagaaacttttttgataaggaataagagccatgtattcacaatatagttagatattattctggtttaagaaagtatcactagccaggcatagtggggcatgcctttaatcccagcactcaggaggcagaggcaggtggatttctgagttcgaggccagcctggtctacaaagtgagttccaggacagccagggctatacagagaaaccctgtctggaaaaaccaagaaaaagagagagagagagagagagagagagagagagagagagagagagagagagagagagagagagagaggaaaagagaaggaaagaaaagaaaagaaaagaaaagaaaagaaaagaaaagaaaagaaaagaaaagaaaagggaagaaaaggaaagaaaaggaaagaaaagaaaaaagaaccacaggcaggttctcctctaagtcacaggtatttgggtaggctcacagtatcagcactgaatgccctccttttgagagagtcttgaatctaattaggcagctgttggtttcccctaagatgtaaacacctctattgcacctttggtgatgtcttagctgtgctgctgctcagtatgctggtttgtaagcatcactattgtgtaggactagtaattgtttctctcctggcagcatacatagaaccttcacatgctataagagctatctcagaaaggaggcttccaaggtagttccagcccaattccttcaagtcttatgtccaaaatatgtggtatcttcagcattagagacttagcttcaaattctgggaggcagccatgggcaatttcaataccctctaatgttttgagggtctattggactcccctaactaacaacccaaaaggaagtttctcatacctggtagtggggttttggctcaatggtctatgtctcttgaagagagcattatcgctcctagtggtgtaattttatttagaaacatgtacactcctcacaatgtggactgaaagaaaccaagtacacattgtaaacaatacatcttcaccaagcagaaatttaatttaggctccataactactctgacattagatcagcatttggttcttagatcaacatttcttttttgtgtaatagtttaatgaatggggaacattaagtcaactatatatgtcccaagttcttcttaattggaatcattttattccccctccaacctaaggacatttgaaaagtctaagaacatatttggttaccatgagttaggctgtggttgcttgatcatatcaagtataaaaggccaggactatcttgtgataaccagataagcttcctacaataaataagtaccaaaccgtcaaagtgctgaactgggggttgcctcagagttctctgaacttttactgacatcaaggccattgaattcatgaggccccacttctctctctctctctctctctctctctctctctctctgtgtgtgtgtgtgtgtgtgtgtgtgtgtgtgtgtgtgtgtgtgagagagagagagagagagagagagagagagaatcattgcttatttcatctggttaaaaatagaaagctactctgatttttcaatagtctgaaatattcagcaatctgagctgtcttatgttctggttcatctaaatcagcagctttattgcatttcctgggcctgttgtttcttcagtagaggctctactaaggtctcattaaagaaagttgaataaatgatctaatacagccctatagctctaggcaagctactaaactgcagtccactcttcaaagtgaagtgaaaaaatactggacagaattgcacaggagataatggacattaagttggcctccatatttgtgtgtgtgtgtgtgtgtgtgtgtgtgtgtgtgtgtgtgtgtgtgtgtgtgtgtgtgcagttttactgaagtcttgatccctgtcgccatgatgcctggacatatggttcctgtgactgggaccatgtgagccatgtgggtgctttcattataaccagttccctctaacagcaaagagaggtaacctccaagggatatgagaagactctttctttgatagatggcccttcttatctctttaactaaaacttctaaaaatcatcagagttcctcctaggatccaaacgttctctagggaaatgaaactccatctatttgaaacttaaatcatccagggatgttcaccatgtcctgtgtcctcagtaatccatgacagaggctctagaagtttccacagtggttcctttcttcagtcataccactttcccactttgtagaagcagaggcattctttgtctttgaccttaccctcttttgccatctccattcttgatgctgccattctgtgtcacatcctcatcccctcttgcctgaaagatgggttgctacataactaattttgttgttagcatcctttccctaattgtaatccacaggatcatttttgaaccagtgtcatgatatccccacgtatgtcctaatagagtgctcaaaacaatcatgctagagtcttcttataactcttttgtaaattgctcttgccgttgcacaccttctgtattctgtataaggaaatacttgccattcctatttagttttagcctaaagcttccttttctccctatttttttaatgaatccttgctcatgctacaaaccctttgaattaaatatgttcctatatcttaattttgaaattgagttgctacctttaagctaactgcccttttttcgtatactagtatactgttagctaatgaatcccaattatgtgttcattttctgtcttttccattcagtgtcccgtgatggaaactattgtattagggagatgaattcagcaagggtgcacagcataagttgcaatgggaaagagtcatagaagcaagcaatatgaaaaccttatgtgaacactttattaaaataatacaaagccaaatatttcttgaaatttttgagaattgcttaaaaaaacacagcaacagcaacagcaacaacaacaacaacaacaaaaatgcactagaaatccaatatgtggatgtggatgcacgtgcacannnnnnnnnnnnnnnnnnnngtgttggtacccccatggccctaggatcacccaaaatctacccaaggatgattggtccccttcaggatgcttgcctggactcttgctaagattagtaaacagaatccatgtagttatagttatagttatagttatagttatagttatagttatagttatagttacatactaaggattgtattttttagcagataggaaatggcttttctgacttaaatatctaggaaggaagtaatgaaaactgtggaagaaagcagggtataaagaaaggggaaaaaatctcttaaggaagagatgctctagcagagtggaacacacttgtaatcccagcacttgagatgcagaagcaggaagatcaggagttcaaagccaaccttgattatacaatgactttgaagatagtctaggttatatgtgaccttgtctcaaaaaagtgaaaaatcccagatgtgagaggttactcctataagtctagtacttgggaggttgggacactgggattgcaagaagttcgaagttagcctggggttcacagctaagttgaagcacatatataactaaataataagaccctaattcacaaaaagagaaaaaagagggaaagagggagaacgagaatgagggagggaggggggagtgaaataaaaaattggctgtatgttgtttctgcctacccaatgaagcgtaatattgagttaatgaaaggaaatctggctttttagtgaaacccactggggttggggggatgaaatagcaatgtagtattagaaattcaaaatatagttccatttaaatccaggtgtatcctcatcaaataatgacttaccgaaagagaagtgtatccgaacacagaaaaacaatttctatcttaaaaatcagctccattataagcacagccacatggtcatttcatagttacccatttttatctcaagtggcaatgaagacattatcaaggcagttaaagcacaagtaagtcttaattaagctcagtgctgacaagagtgacatctctgccatctggaattaccatcatttgctgtatttataatttctaaaatatttaagtttttttttttgtctccacaaactctagagcactgtacttttaccttgcaaagcaaagctgtaacttttttaatttataaaattttagcatttcaattttgatacatagagacgggaagatcagttctcttggatagtcttccccttgagtttttatatgtttgagatttttccccgtctgcactggcatgtccttggagctgcccattgttctggccttgcttaggtaatgatactgttgacatttcatggggactgctttctgtgcatacacaatctcacaccagctttcctggtcctctggctcttacaatctttctgcccttcccccacccccttcatcatgttctctgagccttaagagtctgggctgtgtcgtgaatgtatcagctggggctgtgtgtcccacggttggttgttttctgcattttgacaagctgcggatttctataatgggctctggtgcaaagaaacttttttgataaggaataagagccatgtattcacaatattgttagatattattcttgtttaagaaagtatcactagccaggtgtagtggtgcatgcctttaattccagcactcaggaggcagaggcaggaaaaaccaagaaaaaaaaaagaaagagagaaagagagagaggggggaagaaaagaaaagaaaggaaaggaaaagaaaagaaaagaaaagaaaagaaaagaaaagaaaagaaaagagaatcacaacatagaaccttcacatgctatatgagctatctcagaaaggaggctcccaaggtagttccagcccaattccttcaaatcttatgtccaaaatatgtggtatcttcagcattagagacttagcttcaaattctgcgaagcagccatgggcaatttcaataccctataatgttttgagggtctattggactccctaactaacaacccaaaaggaagtttctcatacctggtagtggggttttggctcagtggtctatgtctcttgaagagagcattatcgatcctagtggtataattttatttagaaacatgtacactcctcacaatgtggactgaaagaaaccaagtacacattgtaaacaatacatcttcaccaagcagaaatttaatttaggctccgtaactactctgacattagatcagcatttggttcttagatcaacatttcttttttgtgtaatagtttaatgaatggggaacagtaaatcaactatatatgccccaagttcttaattggaatcattttattccccctccaacctaaagacatttgaaaagtctaagaacatatttggttaccatgagttaggctgtggttgcttgatcatatcaagtataaaaggccaggactatcttgtgataaccagacaagcttcctacaataaataagtaccgaaccgtcaaagtgctgaactgggggttgcctcagagttctctgaacctttactgacatcaaggccattgaattcatgaggccccacttctctctctctctctctctctctctctctctctctctctctgtgtgtgtgtgtgtgtgtgtgtgtgtgtgtgtgtgtgtgtgtgagagagagagagagagagagagagagagagaatcattgcttatttcatctggttaaaaatagaaagctactctgatttttcaatagtctgaaatattcagcaatctgagctgtcttatgttctggttcatctaaatcagcagctttattgcatttcctgggcctgttgtttcttcagtagaggctctactaaggtctcattaaagaaagttgaataaatgatctaatacagccctatagctctaggcaagctactaaactgcagtccactcttcaaagtgaagtgaaaaaatactggacagaattgcacaggagataatggacattaagttggcctccatatttgtgtgtgtgtgtgtgtgtgtgtgtgtgtgtgtgtgtgtgtgtgtgtgtgtgtgtgtgcagttttactgaagtcttgatccctgtcgccatgatgcctggacatatggttcctgtgactgggaccatgtgagccatgtgggtgctttcattataaccagttccctctaacagcaaagagaggtaacctccaagggatatgagaagactctttctttgatagatggcccttcttatctctttaactaaaacttctaaaaatcatcagagttcctcctaggatccaaacgttctctagggaaatgaaactccatctatttgaaacttaaatcatccagggatgttcaccatgtcctgtgtcctcagtaatccatgacagaggctctagaagtttccacagtggttcctttcttcagtcataccactttcccactttgtagaagcagaggcattctttgtctttgaccttaccctcttttgccatctccattcttgatgctgccattctgtgtcacatcctcatcccctcttgcctgaaagatgggttgctacataactaattttgttgttagcatcctttccctaattgtaatccacaggatcatttttgaaccagtgtcatgatatccccacgtatgtcctaatagagtgctcaaaacaatcatgctagagtcttcttataactcttttgtaaattgctcttgccgttgcacaccttctgtattctgtataaggaaatacttgccattcctatttagttttagcctaaagcttccttttctccctatttttttaatgaatccttgctcatgctacaaaccctttgcattaaatatgttcctatatcttaattttgaaattgagttgctacctttaagctaactgcccttttttcttatactagtgtactgttagataatgaatcccaattatgtgttcattttctgtcttttccattcagtgtcccgtgatggaaactattgtattagggagatgaattcggcaagggtgcacagcataagttgcaatgggaaagagtcatagaagcaagcaatatgaaaacctaacgcgaacactttattaaaataataccaagccaaatatttcttgaaaattttgagaattgcttaaaaaaacacagcaacagcagcaacaacaacaacaacaaaaatgcactagaaatccaatatgtggatgcatgcgtgcgcacgcacacacacacacacacacacacacacacacacacacacacacacactagttgtttctctagagatgatgtgggctaagtatgagtactaacaaggtctactgggatccacgatatgaagttaagtgaatgaatccatgatatgaatgttaagctaaaagctctggtgtcttgaagacataacacgggagaaacagagagtgggcagagagaggatcttgctcttccaaactaactgggtgattccaaactttcattttggggagaagttaaatgatactatgacttactaatttatgcatcagcgatataatttaaagcacatttttgaatgacacaattatttcaatattttagagtaaatagtaggcaatattttcaaactgcactttacaaggaggtcaaatttgtagtttattcctaatgactgagcatttataacaagtcatcaggcaacctttatactactttagctcagcattcacctttcacccagatgcacagagtccgcattgctgaatggagagaacaggtcaggagagactgcttacaatgtctctcacttagaatgtcgtccataacaagaggtattggagggagagtccacgtgagagtggccttcacatgttaggccaactagttgttaatttatttaacttcctttgacgctttacgtttttcttagctttgactctatgtcaaaaaaaattattacataaatttgaactacaaagagaggattctgccaccgtccttcctttgcccaccgtgataaagcggtgaataatgaagcacatggcactgcatagcaccatgctatcctgcagtgtgtgcatgtagaaggtgtgaaagtgaaggtagacatgagagtagtaattccattcagccttcccgtatatatgtgtatgtgtatgcatatacatgcatatgtgcattcatgcatgcatatatatatatacacatatgcatgtatatacatatacatatgcatacacactgcatatatacatacatgcatgcatatatgtatatatatgcatgtatatgcatatacacacacatacacacacacacacacacacacatatatatatatatacatatatatatatatatatatggaagcttctccaatattctttccatatgaccttttttagaggtctttgctgttacttctcctgtttcatgctccttcctgtatctgcccccctctgtctgccatttaatacttcatagttcattattccccttcccctgtttgtaccacttgggtttcccttttcttctcttgaaatctctctatgacccccttactaagttccatgactttcttggttattccaaatgaaacacatgtgtgaaacatctaaagactcaaagttagcatccgcatatgacagagaatgtgtaatatttgtgtttctgggcttaggttacctcatccagaatgattattggtagttccatttgtttttctgtgaatttcattttaatggtatttacaataatagcttatgttgtgtatgcaccacgttttcattattcaacagttagtggacgtcttggctatttctatttgctagctctagtgtatatagcaacagtgaacacagatgaacagcattacctgatttccatagtggatatgttgctctccactgctatccacagtggacagaattccctccctctctatgtccatgctataatttgatatcatgtttttctagtctcacccattatgactagggtgggatgaaatctctgaacattttaatttgcatttccctgatggagtttaaactgagttactctgtaatgggaggagaggggctctcacagataccatagatgactaaaaaacaatcccagcttttggttatctcttttcaattattggtcagtagggtcatagagaacccgcaaacattacaagctattgtcattgctcttcgtcactctccagaacttaatggtaagaccccattcctgaagacaccacattctgagtcataaaactgagaagacaaccaaccaggtacatgccttgaagctctatccgaattggctatctttcatagtggtgaaaggtactgtgtattcaacttgggggaaaaaataaacaatgatctcattcaactgtgaaccctgccagctacaaaaaccactgccctaaaaatagtgttgtaatagtgacacaaatattatagatgtaattaaccactttctgattggatatagagcccactgtacaagacagaacttacaactggtactattaactgagccatagacttatgactggccaggttttatgtctcagagaagaacctaatactattattatgctgaattagaggtcaattaccccctaagttcttgtcattatactcatagattattgtatctctcaaccctcatcagaggaccttttttcagtagatggtgatgaatacagacgcatctactaaacataaggagaataaaagactatagagtactagctcttaatagctccaaagtctcattggttcagatatgttttgtaaagccattgatatgttttgtagagcatggtatggtgatgtgggagtgggtgcttcagcaggtccatactgaagcatccttccccactgagggtacccagccatatgatggatataatatagaatagagtaataattccattcagattccctgtgtatatgtgtatgtgtatacatacatacacacacacaggcacatgtgcacacacacatgcacatgtgtgcgtacacacacacacacacacacacacacacacacatacacacacacagaggcttctacaatagtaagtttccatgttttcaaaggtctttagtgttacttctcccactccatgctctttcctgtacctgtcttaacaatagttggtcctagacatgtgcacatattgacagaactaagtagactcaatcagattttttttaagttggttggggaatgttggtaagaggctagcagatatattggagtggagggaatggaggcagatttgatcaaaacacatgatatgcaggtaagacatcctccaaaaaccaagaaaatagagaacaatggcccatcaatctgctgatagcctttaaaaccagagctataagagttggacttgatgctgccttttgtacaactccaagagaaagcctgatccatcaaggaagatagttttaccaatgatgacacagagaaggagccttgagaaaaataatttgttgaggagggtgttatgggacagatagttcttcagacatgatggaatatgttctgagtagcagaacacacccacggcttccatcacagatctctcaggagcactgatacttccaggcctcatggtccatgggaaaacattctccaaatactcaatgtaggtgaggggcctatttatatcatctttggggaccattgagccactcctactattgtaatagcatattcctgtattttgtgggtcttaatctcttcccacatccaaccataggaccataaaaacagagttgaagtctatatgcttaaaccacagggtgttccataattcatacaggacctgatacataacagccaatcagtaaattcctgagttctttcctagttaggaatgtggaaattattagaataagtatatatatattcttttggagatgtttcttcaatttacaaagaatttgcttgatttttatagttaaaaagttcaaaatcctctagctgggcagtggtggtgaatacctgtaattccaggactcaggaagcaggcagatctcagatctccttgtccgaggccagtttggtctacagagtgagttccaggacagccaggactacacagagaaaccctataccaaatattgcttttcttgacatttcctgaaatctaaccttatggtcctatgggaatgcagagtctagacgctcataatacgcaggcagcagtttcccataatctgggggattagtagaaggatgtggcatttagttattgatttttatgtctggcaaaagttcgaaatgcgtatgctcagaggagtctgaagtctgtagaacaataaaacagctgacccctatgtcaaaggtatagtttcccaaaatttgaaattgcccttctgtccccaccccgtgaaagactaaaacatgtgtttttggtttctcctactaaatctgaacaatatatgctagtattctgtgtaagacatgataatggggttgccatggtaatcccattttgattataactagattatgaatgccatccgatttctattcttctagagtttttggtttcttttcttttacctttttgagtgtcagcattccagcggctgtaacagcacagtagcaatctggttatgtctttctgtttctgtattaggattcatctctccattcaagggagttcttgggcattttgccttgcatcagcattctgctgacgcttggtattactccgtgttagtgaatcttcttccctttaagggaaatgttttatgattcctaaggctgataggatggtttaatgccatgtgacgagcctagaagaagcaggtcatgttaacctagagatggtctttgtctgactccagtatgcattcaaaataaccctacagcagaatagaaaagtgacagtcgaccttcacatgactggtagtctttaaagctaaattggcattttgactttgtcactctagattatcctttgtcagtttagaattgcaatgactatggagatgattacagttaggtcattcagaggataatagggtttatacagacacattagtcttcctaggacataaaggaatttttatgtgtgttgtgacaaaggaggccctgacttgccatatgaaaggacaatttattagagtggccccaacgatgcacttaagaatgcaaattgaaatgcatattctaggcaaattagagggacagaggagagagtcaaaattttcatagagcaagggcacttgctccacccacctctacttgtgatggatctatattcactcctaagcattaagtacaacatatgaatcagcagctctcttcatatctcagttcctactaggcctggcctagagccaacatcaagccttgtattcagatgacctaaggaactgttgtctatggtaagctacactatcctatgctaatgtgataaaggctcctgttgggagatgtctaaaagacccaccaataaatgttttattaatataccatcaaaacagacacttgaaaatttcagtttcagatgtcattcttacagtgacaggaaagggactttgcctccttcacaaagttcaaggttttgtgattgtgtacatgtctaaaaagcagttgtatccaaaagctccatgtgcagaagggtatgacgcaccttagctacagttccactatttgttcatccctatcatgcacagacaataatcaggataaaaatgaggatgccactcgaaagagagatggaaaggattaagattccactacacaatccaggtgtcagtgaataatcatttatgctttctttcccttaggcatttacttgttcaacaataacgtacttagtaggaactgaactcaaagatgtctgttagagatgcaaaacagagagagacaaattccaatcatttcaaatgataataatgtaattgcttaggtaaaaggagaagaatgaggaggagaaaggggaagaagagacagaggaggaggaggaggaggaggnnnnnnnnnnnnnnnnnnnnccctgcgcgttattttttagtttttctattcctgcgtttttattttcgggactttgccttgcttcctctgtggcttcccccttagcttattcagaggattcttcctaatataatgcattctaagctccgtttagaaaagtcccagctcttgaaggaaaccgaggaatgctggcctgttcaggaactcctgcctctcttggcaacggtgaagggttgtttttttttttgttttttttttgttttttttggtttgaaaataacccaggaattctctcaccttggtttactttctacttatttcatgcaccggagctacctcgaggattcgagattcgagagataagtagatgcccaaagccgttctcatggctaacaggagggatttgaaaaggaaccctgttcccagtcggtttatatcaaaacagcccgtggctttagcggctttaaacataaggagagcggccagtgagtctgaagttatttaatcctttagtagtgagacaggtgacctcgttaggggagcatccactatgcaagacacaacagttggagagttggaggttggtccctgaccctacagagatactgagaaggtgggacaaaccggaaacactagagaatgtaatagcacgccgagtcggtttttatggttctttggtggcaagtaaaatgaatcaagaaagggaaaatactgacttccactcacttctacaaaaacaaaaacaaaaacaaaaacaaaaacaaaaacaaaaacaaaaacaaaaacataatttatttgtagggtgtgggctcacaacatggaaaaactggcctgttgaagaggctggcttgggaaatcagggctgaagggaggtgaggggcagatggcccccatactcactgagtgctgaccgcctggtaaacactgctctgtgctccagcctttctgacgctattccctggaaaggtagcccattttagtgatcagcttaactgagacgaatgcacttccttgtaggtaaattacagtttgggatgtgtccaaagcctttgagagctgtgtctgccaattacaaaagagagagagagagagagagagagagagagagagagagagagagagagagagaagaagaagaagaagaagaagaagaagaagaagaggagaaggaggaggagaaggaaatagaagagaaataaaattataaccatttacaatatagattttcatctattatctggttttgtttcagcatcaactaatgaaacacttaagtcctgctggtccataaaccatcaagacataggctagttttatatataaactagaactagggccaaattattgatctgtgaattttgtcttctgtattattttaagcaccatacagaagcagaagtcatccttttagtagtcctgagggagttttgactgttttattgaatattttctttacttacatttcaaatgttatcccctctcctggtttcccctctggaaacctcctatcccatcctccctcctcctgcttctgtgagggtgctcccccacccatccacccacttctgcctcccagccctggcattcctatacactggggaatcaaaccttcacaggaccaagggcctctcctcccattgatgccaacaaggccattttctgttacatatgtggctggagccatgggtccctccatgtgtactctttggttggtggtttagtccctgggagctctgggggttctggttggtttatattgttgttcttcctatggagctgcaaatcccttcaactccttcagtcctttctctaactcctccattggggaccccatgctcggtccaatgcttggctgtgagcatctgcctctgtatttgtcaggctctggcagagcctcttaggagacagctatatcaggcttctgtcagcaagtacttcttggcatccacaatggtgtctgggtttggtaactgtatatgggatcgatccccaggtggggcagtctctggaccgcctttccttcagtctctgctccacacgttgtctctgtatcttctcctgtgagtatttgttcccccttctatgaagtacctaggcatccacactttggtcttctttcttcttgagcttcatgtggtctctgaattgtatcttgggtattccgaacttttgggctaatatccacttatcagtgagtgtttatcatgtgtgttctgaatggaattggtactgaaacagacaggtagatcaatggaatagaattgaagacccagaaatgaatccccacacctatggttacttgatttttgacaaaggaattttgacttctaactgggggtgttgcaaaatgaatcctggccaaagcaaggtttatgctaagttatgctgcagaggtaaaggtgtgtgtgtgtgtgtgtgtgtgtgtgtgtgtgtgtgtgttattacttatcactgagagaaatctgtctaaattatggatgtgtcaaactaaatgaacatttagagagacaaattgtatgtggcgagaatttaagagttttgagaagtaatcacggcggacaatttggaaagggaaaggggacaagcagtggtatctttgctttgttactacctagttcttagctttctactcaacattttctcagcaagcttgaagggcatctctgaagctttcatttgggactctctgataagactggctgtaaatagagatgtgaagacagaggttgaggcctgtcttagtgagggttgctattgctgtgaagagacaccatggccatgccaactcttataaaggaccagcttacaagttcaaaagtgtagtccattctcagcatgacaggaagcatggtagtgcacaggcagacatggtgctggagaaagagctgagagttctacatcagcaagcagcaggaagagaaggagatactgggcctggcttgagcatttgaaacctgaaagcccaacccagtaacacacttcttccaacaaagccatacctaccccgacaaggatacaaagccacatcttttattggtgcaacttcctatgagcccatggagaccattttcattcaaaccaccaccatggcccaaagacaaagcagccaaggataacacaatacaccttcaagaaataaacatcagatacactagaaaggacagctatctcagacgtgaggtacaggtagagtgatgggctcaggcctaacagtccctctgtagacatcactcaccttctgagacagatgaccctcacttaatgtatttctcagtatttgaaatgatgccatccaatagcaagacgtgaaccactatactttgttttgtttactctttgttttattttacatttaagacgaccccatgtagaacaggcagaacttgaattcactgtgtacacatctagtttttatactttatggtagaataaatcaaaaagtaaaattatttggtgaaattaattttacaaaccaatagctgtcaaactaactacataaaatgtcaacatcttaggcaaccaatgactgccaagaaagggagaattattctttcttgggaatgagcctcttattggttatctaataccgaggggtcattcctagaatcatatacacacaaacaacactagatggactcagcagattgtattcacgcacacacacacatacacacaaagttagtctctgtttaggtgtagtcacatgtgtgcaggtctgtgtgaggatgcacacacataagtgcaggtgcagttatacatgtgtgtgcataggtgtagaaccagcagtaaatattggacatcatctctcgggagccatctactttgttttcttgagacaaggtcttctttggtagcattggggatcaccagttagactggaggttagactggctggccagggagccccgtggatcctcctgtcttcatctccctagtactgtgatttcagatgtggagcaccacacagggctccttatgtgcatactagaattgaggtaggtctggttcctgtgcttctgtcgaaatcacttcgactatcagagccactacccaggtccctctgtatttgtattttatactaaagctgtaatccatgcagacactaactttccatctgctttgctggtttagacttcagcttcataaactctgtcatgataaatttaatttcatttacctatgttgttgcaagtatacttagaagttttccaaacatggaatcaattattctttttaatcttaggtaataaaattcaatatggctacaaaaattcagccttcttcctagttctccgaagtctgctatgctctactaataatacagctgataagggtcttaaatcctgatactcaatgtgtgactttggacaaaatgctttctctttctataccatagttctcttgtgtgtaaaaattaagagaagtgtaacatctacattataaggttatcaagaaaatgaagtgaaatgattctggtataacattcttagtacagcacctggggcatcatcaccagaggctagcccttttgatcatcatttttgttaccatggtttcacattcctcatgcccctgtgtcaccaccaagtttctgtcagaaataagcttcttatctctgggtctgtaaagcagccagaaactagaaaaactatagaaatgtaggcttttcctgttccatatcgcattgtctgtggtggttaggttaggagtgccccccccatgtacccatgtgtttgaatgcttggccattagtgaatggcacccttagaaggtgtggccttgttggggaaagtgtgccactgtgttagcaggttttgaggtcttatatacccagtgaagcacacagtctctccttggtgcatatgggtcaagatgtaaaactctcagctccctctccagcaccacgtctgcctgcatgccaccatgattctcaccaagatattagtggactaagcctctgaaactctaagtcaggtcctattaaatattttcacttataaaagttgcagtagtcacagtgtctcttcagagcaataaaactctaagacattgtctattgacctgtatacttccccatgtgactgtcacagcagaactctcaatgtcctcatgggaatacgacagactttccatttccccaaactgaagtcttaacgatgtcattgtgtctaccttgccttcactggcctgtcctagccagtccacatccagttgtcctgtgaacatttctctgagcatctcatgtttgtccagctcttcatccccactatcctcaccatcccttgccctaacagatgcaatgtcctcctcctcctcaatgattgcttccgcctgcagagattgaccatttccctaaatgttagtcataactccacagtagccggcctgtttcttgtcattctcgacagcttgctttgtgactgtctcaccaacatgcctctgtgtttccatgtctgtgccttgatgtgacatctctctccaaaaatgcccctcttctctctcttctcattctacccaaatgcttcactgttttctctctgcctcgatgaatctcaaagccaggcaaattccattagattgaagattcagaattgcttgactaatggagggagtacggtcccaaggcctaaatgaatctatcaccttgttttccctgaccaaagtacctactctctctgagattcagtcttctgccagttagatccacaaaacctaagttgcaggagggtcttcactatgaagagtaatataaatgacattccatgaggacttagaaagtgtgttcaacttctgttgttggcagtatattcatggggaacttaaaatgcagctttgaaaacatctttcactgtaagatcttgtcatttgtaccactatgcaatatatgattgatttctaaactatcatataagtatctgggtgatggattgcacttaattagattgtgaccacctgtacacatgtatatacagggatatttatagatcaaaagagaggcacttctgtgcacattggtttcaataggaagttgatgatatttctattttattcacgaggaactaagacttgaaaattatcaatccctgtcaaatcagtgcagatcttaaaagtggtgtcaccttaaagggatgtcaaaacgtatctttctcaattctgtttgactttcatttttaactacatgtcacatatgtgagaatctgttgcctggatcataatgatttttatctaggcagcaatgtacatggggattgtgggaggaagggaggggatgtggttgttaggaggttgcccccaaacaaataaggtacaaataaggagaactaccaaaaagacaaccatggcaattcattgggccactcaaagttgctgtctggagagacatgggacactcaagtccttcattctatgtaaagataagatctgagtgtttgtaaaagcccattagtaaatctacatgctgaataataagatgttgctgtagactagtgttctctccaactctgggggggtgggggatgggggtggcaacttacaaggtaaataattttgttctgaatattgtaacataaatcagacaagtttaaatttaattaagttttgtattcaaacattacaccattagccatgacaaaatatagagcattttcatctgaagcagagtaaggaaagccatgactaaatatgctattatctgaagcttgcctttagatgtatagaaacttacctatagtcataggatgccaaagagttatattcatggagcattcttgggatacattatgaattcttgagtttagaatatgggctgtcacattttccgaaggaatgtggtaatttaatctttgaagaaaatgagctcgtacttttccctctatcctcagttggcatgtgattcctgtcgtcattcaagccaaaatttgttattataaagtaacaaactcattgtattgcccaagttcaggttaaacattaacctttctccatggatcaattcctgacaggaactggggaagaggcagagctcttcaatgtcttgtgcttgccaagtgagaaaccctgaggcagctcagctagggttccatcatgtgctctgtgtgagccttgtgagaagccttggttcagctctgcgaacagctctgtcccagcccagtgtgcccaccttgccctaaggcaatccttcccatgacctttcagtctccaccctctgttctgaatttgaaaggcgggctcttcaatccggtgaaatgcaatggctgccaagcaatagaatacaaagtatcttttattagtgaccaaaaactgagtaacaaaagaggtatttagaaatgaagaaaacaaaagaaagatgtctcatttagtacaaagtatgcactattttagtatctcttgaaaatattttatatgccctttaaaaatgacccttgaggaattgacaaagtcctgtattttcactgtcctataaaagtctgtcacagaaggataatcagtctcctgcttgctttttttgtttgtttgtttttttgtttgtttgtttgttttttggtttttttttttgagatagggtttctctgtatagccctggctgtcctggaactcactttgtagaccagactggcctcaaactcaaaaatccgcctgcttctgcctcccgagtgctgggatcaaaggcgtgtgccaacacaccgggctctcctgctctttcttatcctaccataaaattgttcaatatagatattgtatttgatttactttgaatcctttatttaaggagcaagtacaggaaagagctactcagtggttatttaattagtaaaagagtgagctaaggaaaggcgtgttatttcacaagaagctgttgatgtgggtagataaacctggtatcttcaggtaaaaagacggagaatgttttttatggctgttgtactggggattaaatttaggacctcatacatatcaggaaaatattcgaccaatgaggaacaattgatagtcctactcagctctggcatctctgaaccaaagcaagcgccaccatagcgtgatcgcccacgggtacagtagtggcatacacaccttggcactaaccaactttaattggacttaaggcccatgcaaggaaaaggaattcatgcctggtcctggaaaaaaatagttaactactgagacctcctgaaggcatgaatcttagtaaaccagcactgtactagaccagcacgatttgggagaaagaatgttcaataattcctactgagcttaaaaggagcagatgcaacctttctacttagaccagcacacccaggtgacgttgtgctggtggttgtcattagcagtgtagactgttcagatattagattactctactttgcctcagctcgcttcctcggaggacttatgagtagtactcatcacccaaaggcaccatgcaagttagtcctcagggatgagggttctgtacaatagaattcccatacctaatgctcacagtcactgtagaagagagggccaggggaaagatgtttgttgtgaggttgtgtctcctccctaccaggcttcgtactagcaagcaggacactgctgtaaaacagccaggacacacacaagtcactgcgtccttggagtctccttagggactccttactcagtctaacctgagaaagttagttctctgtgcatagctttcagagtatagctgtctcctatagtgcagtgcctctctcttgggattcttatggcctagagtgttcccctgcacatatgaagtttcctttgcctcagtagcatccagaacagtctctttgacatgtgggtggtttgtagaacaagtcctgtgagggctcttacctttggcagaaaggtctggaactttgtccaaagtaacttcttgctagaacacgtcggtaatctgcttctttaatttccaggtttcctgacagacaagtgtgttgagaatgggttaaacagagtccccgatgctcagaggtttctctgtggagtccagcagagaaattgttctctatcagatagcagttttcaacacgaacatcatgatccctttgggtgtttcactggggtcacctaagcccattagaaaaagctgatatttacattacaattcctaacagtagcaggattacaattatgaggtagcaacaaaaataattttatggttgggggtcaacacaacatgagggactgcattcaagggctgcagtattaggaaagttgagcaccactgctgtaagagaaacgtcagcagagctgtacgcaaatggcgttcaggagacagagacaaagccagggaaaccctgaacgatttcaggacagtactcacagctcaaggctgtaacctagcatccctgggctcagttcatctcatttgtctcttctccagctccgctgtgtcttccctgcccttgtatcacttgcagatgtgttcaccctcatgagatcacaagttcctaggtccatgatgatgaccatgtattatgttccagtgttgtacatagtgagtgggtcctcagaaaacgtgctacttccaacaggctcactataagtacatctctgtgtgcataaactcctagagtcaatgctctcctttcacctgtgtttctagaatatgctgcctgctacctgacacaaatgatgagtggaccatgtgttccacttaatatctggtttagagacatagaaccttgttgatatttgctcttgaaatcctagagtttcatcatctcaaagggaaggtgggaaagtcagcatctagtacaggccaagtgacagaacctctgtgcttcctaacatatgcatccccaaacctcagtgttagctgcccttgctcttagctgcatgatctgttgttcctatttaataatttctaaatgagcgttatgatctcaaatttacagggacatcatgagaagtgatttcagatttatacatgtctctaatgtgtaagcttgtgtatgtgtgtattcatataatacatatgtagtatctaacatggtatttattaatatctcttattgatgttaacaatatagcaactagtattatatagttgttataacatatatatatattacatgtatatgtatgttatattataatcttggtgcagggagaacctttaaccaccactttactaaacaagcatgatttaggagaaagaatgttcaataatttttactgaatttaaaagcaacttatgtaatatatatgcaacataacatatagttgttatataatataagtaacaactattatcatattattattttgtcttgtatctaaaatgaagttaataatatatttgttgtaaggctttagaaacaacctgctaatcttctaaattagatttttttagaagaacctgtccattatattttcaaatacggtttatgaactcattgtgagttgatcaggaaagaccttagcagcagggctggtgagatggctcagtgggtaagagcactgactgctcttccagagatcctgagttcaagtctcagcaaccacatggtggctcacaaccatccgtagtgagatctgacaccctcttctggtgtgtctgaagacagctacagtgtacttataataataaataaatctttaaaaaagaaaaaccaaaaaaaaaaaaaaaagaccttagcagcagatagaatgtttgactactgtgcataagtgggcattgctaactcttagttcctttccttttcttttccttttattgaaaatagaaattttagccatataatataacctgattatggttatctgtctttcaactcttcccagttcctcccaactttctctcctatgaggatttattctatctcttaatagaaagcaaacaggtttttaagggttaaaaataaaccaaaccaaaccaaaccaaaacacaacacatcagaaaaggacaaaacaaaccaacagaaggaaaggggcccaggaaaaagttgtgtcttgtatttgatatgaaatataaacaggtctgcttttattatttcctctggactaatttaaaaattgtgattgtccaatgaaacaaacctgcaatatggaatgggctggaaaagctgttggtccactttcgtcttcatttcttagcagactggttgccctataggaactaatattaatagcaatgcaaggtttcaagataatattatctctctacacttggccaaggaaaattcagtctggcaaatcatcttagcccagaagccttccctaggcaaaaatataagctgtgaatgaagaaagcatgtgtctagaagaggcaagggtggcgttttgccttctacagagagtgccttgccaaatctcctcttatcaactatgacagtggatctgatgacagaggaacagcccacatcatgctgcaggagctcatcccttttctgattctgccatctctctaatgagccagggcgcatgtaccatcccacctgatgtcatccacctgccaatacaaatagtggaccttggcttgtctttggcagccaacatgacaaactgtattttcataattcaaggtaaccttcccagagagttaaaggtggaaaacatctatgataacttcaaaccgaaaaaaaaaaaaaatactctcatctaaaattggaagtagtaagccacacaagccaatggcagtagataacagaaaataatattttcaactcttacaagcctaaatgtattttcaagagctcaaagaaagtaactgaattatcttccacatttaactacagtgcatactttctggagtgttaaaatgttaagtgaatttgagattcagtggaaaggaaagagaaaggatactcaactaccgtaatcctgaggttgcaaccagtacgggctctttgctagagaagatgagttctttatgatgtctgaattaaaagcaatgagtgtcttttagttctaaaaagcaataggttttactattgtcacagcatttggaggtgcacacagagtatatatgatttgaaaatgcatgccagaaacaaaaagggagactaaagtcagtattgttacatataaggttagcctttgttgattgagagaaacttaaatccaaaatgaaggggagaggcctcaatgcagactgtgaatcagtttctgtacattgactgattagcatttctttatgtaggaagacttactctataggtagtctgtcttcaccatctcattctaacaacctgtacctataattctgaattttccttctctggtttttatccgttttccttgtgtcccgttcttgaggtggtccccatcataaagagggagagaaaatttaactgtataggtatataggtagtaacaatttgaaatttcttagatgttaaaagatttgcaagtatgaaagtaaaatagataattcctaattataaataaattatttttaggaacaaaaaggaattaaaaaatcacttcttgagaaacaagaaactcacattccaagattatagagagccatcttgtgggcaagttgagttcctcacgcacaaagaatgactacttagataatgtgtctctgtctggagttcccttagaatagttaaaaagtagatgaagtgtatggcttcactcttttgaacaggaaaatgtgagcacagtttagcataactccagcagtgtctccaaagtctcttgcagctcacctgtgaacccatcacagacttcatattttcagttagtgcattttatatattacacagggaaggtttgaagaatttaaaatttactcttaatgtttcattctcaaaaatcatcctcacattactcttctaaaataaatcaatgcattaattccttaattaaaatatggttgctgtattgagtttctaagcagcatcgtaatagttatattctccatctccttttattcctaactgcaacaaagatacattttcaatattggactcatgtcacagtgtacatcacaaagatcatatgctcctctccttccatccaaaannnnnnnnnnnnnnnnnnnntccatctctgtctctctatgtgcacttcagtgtgtgcatttttaattcttctgttgattgacatttcaatataatctgtaacctggctattgtaaatactgaggtactaaaatcaagagtttgtatggcaggctggagagatggctcagaggttaagagcactgactgctcttccagaggtcctgagttcaattcccagcaaccacatggtaatgtaatggggtctgatgccttcttctggtgtatctgaagactgtgaaaatgtattcacatatgtaaaataaatacattgtttaaaaaagagtgcatatggatcttctacacactgatttcatcctgtatgcctagaacgttgaatcatgtgagatgcttaatttgtgttttagagacacttcctaatgattcccaggaatggtgatgctgatccaaagattctttttcccttacatcccacatctttccttttctttttttcttttaattgtttgagacagggttttctctgtgtagccctggatgtcttgggatgtactctatagaccaggctgaccttgaactcagagatccctttgcctctctctcaagggctaggattaaaggtgtgtgccaccaccacccagctcacattattcataatcattcttatgcacttgttattgtgaacttaatatacattccctgatggttagggatactaaatttttttcatttttgtccatgtacctgctgactttttaagctttttgagaaatctgtattttgatccttctacttgtaacaattaatagacaatattgtgaacttgtattgtgtatatttggaaccatgcactcatttttggtgtttaaatatacccaataatgtgaacattaggttatttaaatttttctattattaaaaaaaattcatccagtagctgagcatatttcaagagtaggtagcatttgctcaaggtggggcacaatacagtgaaagccatgatggtgtgcacctgtaatcctagcacttaggaaactgtgaattcttcgaggactcttgcatgtctatggccatcctagagtacataatgactattgggcaagcctagaccactgtgagacctatctctcaaaaagaacaaatgagagagagaaagaaagagagagagagagagagagagagagagagagagagagagagggagggaagggaagggaagggaagggaagggaagggaagggaagggaagggaagggaagggaagggaagggaagggaagggaagggaagggaagggaaggaaagggaatggaagggaaggagagagagaaagagagagagagagagagagagagagagagagaagaaaaaaacaaccaaattatttatatatagagagacagttgttattgtatacagtcaccttgctgtgaaacgggtctcttgagcttctttggttggtttgtgaggattaattgttttctgttgttttatcaactctcgaatacaatctccatatcaagttccatgcctccgtaaatacaacccaatcctctatgctttataagtttcccttgtgatatttcacacctgagtaggtatggtagttgccatttttagtttgcttattgacgcgtgcattgagttctttattttggaaatcccgtctttgcaccaacaaagataaaatcggaaggagttatattaaacgggataatccaagagagccatggcacacagtgcacgggcttgcttttatgtggactcttagaaaaaagtcacctggcagaaatagatagcaaagccatggtcacaagaaactgggggatgaagatgaagttggtcacagggcatgcgatttcagtcagacaagggagacgttctatagatttattgtaagtcaatgcgactctaatcacaaactattacatacataagattgatccaagagtggatcctaagccttggcataacagagctttaagtgtgcaatgcaatgcttttgtctgtgagcttgatttagtcattctacaatgcatctgtatatcaaaataccatgttacacatcataagaatgtacagctaatgccaacataaaaatagtgcatcttggaattatagggtaaccttaggacaactgaagctatgacagcatgaacctgctatatcggagaaaagtcttacatcatattgctctataagtacataagtattgtcaaactacctgtgttccttcccttttaatccagacattaggtgtcttcttaaaaatcacctcatccagttaggagtttgagggtctgttttatactctaatatttcttatagattaccttctttctcccttttcattaatgctgcatgagtccatggtcaataagttcaactttacagacttgagctgatatgtgaccagaagattccccgagtctcttattttatttataattcatttttcacactccatattccactccccgctccccccatccaccctccaactgttccacgtcccacaccttctccctacaccaccccatctccacgtagatgcccccattccccacctcacctaacctccaaattccctggggcctcgagtcttctgaggattaggtgcatcatctctgaacgagcacagacccagaagtcctctactgtacgtgtgttggggggcttcatatcagctggtgtatgctgtctgtttggtggtccagtgtttgaaagatcccctgagtcttttttttgtttttttcgagacagggtttctctgtatagctctggctgtcctggaactcactttgtagaccaggctagcttcgaactcagaaatctgcctgcctctgcctccagagtgctgggattaaaggtgtgcgctaccacgcccggctcccggagccttttattaagctgaacaaacattttaaatctggaggaagaaaaatatagtatgcaaaatatcctaaacaccactaagcatgggccttcttctttgttgttagactttctgatggtgttgatgagtcagaatgaacgttttcatattcagaacggcaaatacaggcacatttcttaaagaaacctcaggattgtgagaaattaccttccagggtagaggattccaagagtggaaacatttttacattaaatgatcgtgattcaaatattatgatgaattttaatttagcaggcaattaactctaatggaggaagctatcacctgacagtgggttaacttgcattattccctggtacagccacgctgttcttcttgtgactagaaattcatcctgcctcccccagctaaggtcaaggatcctgtaggacttacagaggttctggggctggtaggaaattgtttcagatgcgtgtgcagcaaggctcagagcatggcttaaaagtggaagatggctctgctcctctcaaattctttcatcttccagaatagtcacactccagtgagcgtacccaaaactcttaaaagtccaattagaaaaatggtcttaattgccaagccagtgatgtaacaattatttgactcttggagtcgggggctgggggggttgttattgtttaactggactcaaaagataaatattccgtgcagattccgtagaaatttccttggctgtttgctgatcattaacatggtttttaactcaggttcacagggaagagctattgcatcaataatctgctcttttgtttcattgtaatgaactggtcacacatgctcacattatctctaattaaaattgcgaatttaaaacaaagagtgtgggagtggaaaataagactctatggtacctctatctgacccaaggcaccacccgtccctacaccctctaccatggaaatacctctaccatgtctgtttcccatgggcatggtatcctagaggcataagactaagggagaaggcgcactctgagaactgagaggattgaaggacaaatagggggagacctatttttttaagatcctgggaagcagagggtgacagagaaattggtgttaggcacattcatagggtggtgcttcctggattgaaggtggaggatgtgtacgaatggctccctgaaatcctaaaccgaccctttggaggcttcaaaacggaaaaggttttagataaggtgttagctgtccagttgtgggctgcaggggggttcttctccctgacaaggcttggtatggatcttgtgcaagagcacactgccctctgctggagaattccacaaagtgggagacccagacaactgcatttcagcatccagtaagggctgcacggagaatgttgaaatctaaagcagaagggaccatgcacattctacctcatgaaggcagtgcacccctctaggaaaggaagcctctttcagtgaataggcccttagacctttgtacagtgacatccccttggatgtctaatgaatgctgggttcccacccaactgcccagtattgaaatccaacaaagaaaaaaaaaaattgagaaaaggaagtggtacctaagtagtatgtataagacagaataacaaaggtcatggtcaatcaaaagacttgtagaagccgagagttgctgttgccaaattgaattaagtgtctctgtcgaaagatttttaaaatactatgagaatcaaaacagatgaaaagccaaaaatctagaaaagaaactctcagagagaagatgggaacaacagaaggcactgggactggtagtgatccgggaaggggaagatgctaaacaatgatgaggtagttatgctcgggaagccgggtgtggctgtgcaagcctttaattcctgcacttgggagacagagacagacagatcacagagttcaaggccagcctggtccacagagtgagtttcaggacagccaggattatacagagaaaccctgtccccaaaacaagcaagcaagcatacaaacaaacaaacaaaaaccctaatatacgaataaaacaagaaaatttcctataactagaagaaatgggatagtttagatcctggatatgaggaattaaaaataaaaaggaccttgctaagaaatatgctcaggatatttcatagcgcttgacatatgcagatattcaaagccttcaaaacaataaaataagaaaaagggaagaggagacaaaatatctaaagccatcagaattaaactgatgtcagaatgactcagcagctaccaaaggtgaaaagaagagacaccagcttgaactctggtgcattcatggtacagatgtcattggagtggacaaccgctttctgattgcatttagagcctactccacaggatgaaacccaggcctggcaccattatccagctgagagcctgtggctagatcctagaagagaacttggtactattgatcagctaagtgggtatggaattaatccaactcttcctgatttatctttattctcatagattaaagcacctctagttttcaccagagaggcaatgtttgcagtggatgcttggcatgaagagatccacaactgggcagagtacagagaatgggagacttcagagtgttcaggcccaggggagtatagtaccatacctcaactccccaaaggcttagggaccattgcagaggagtagattgtgaggaatgtggctaccagagggagtgaaaaactacagggaagcagagtctcctggaaacaggaaggtgactgcacatgtgagcttgtggctgtcctggcagcatgcatagggcccatttaagcccaagccagaccaaatcccagcatgacagggggagctgggcaggaggttttagctccaatgaggaactatgagcagttgttagttgctagagaagaaagggtcagtttctctccgagtgtggctactggtaggtcagcccctccccggtggaggaccacacacccagaaaggtttgggcagcactgactgaccttgacagaaaaggaaaggaaacaagagggaacatgaggatgggtggggatggagagagattgtctaggaggagttgggggagggaaggagaaagaatgaaccaagcagcagtgtcagatgctaaactataatgcagccaggatttcagcatgtaaatgcaagaggaaatcgatgctagttatgcaaggaataaagaaagctaaaaagttactcactctgtaaaatgtgaccagctattaaacagaaacaggaagctgtttcctgaattattaaagtaagccacaagtccaacacaagtgacaacagagaggaatgcaggatataagagcatcgccgggatacctggaaaccacctaaccagaaagtacagactgcaaccgagggcaccaaggccagatcccaaagggaaagacacaagaaacagattatccgatttgactgatcatctgagggatgtacagcaagaaagtgcttcactacaaagccaaagctgcaacatatgttcatagtaaataagtcgcacacagtaataattcacaaaccatgctaatatatgtgcagagcacttaattaattaaagactgtaatgcagctaagtaagaaaagggggcggggatcagaaaagactcgggcccttaagaagggagagctcaaattactaagaggaaagacaggatgtgagcatacaagtttggattgtagagttaagaaccaacgtaatcgaagcaatctgagaatgagtatttagagtagacacccaaacgggctggggacataggaccttggcagaacttgctcagcatgtgtgagaccctgggttctagcccccaaaggaacaacacaacgtgagaagctacacccagatagctcggccagtaccagtgcttgccactaagcctgagtttaatctctgggacccatgtggtggaaagagagaactccctcaagttttcctcttaccagtgcatagatgtcattggagtgtgcatccccaccctcaaatacacacatataccccatacacacacacacacacacacacacacacacacacacacacattatagtggatgtttattcctccaagcttttggcacggtttctaaaatatatgtgcataattcttccgttcattgtgatgagtatatcattgccttaatgcccccctccaaatcatataccagcaaaggattttattttctttattcttggttgcacacaagtgtgtgtgtgtgtgtgtgtgtgtgtgtgtgtgtgtgtgcatgtctgtgcatgtgtgttgtctgaatgtttataaatgtgagtgtcccagtgtgtggcagttaaaggaagatgtcagacgtcctgctatgtcggtttgctttattcccataaaaaaggctttaccacaaagctggagctccaagatcctcttgtccctgcctcctccacccgtagctctggtgtaagctgtggtccgggcccatgtctagcttggttttggagactgagtttaagttctcctgcttgagggactagccttctccacactgggatatcctcctctctcgtttcctggagctacttgtaatcagctgggagctctgctccacagcgacctcactgaagtcagaagagctgatgggtgtgctagtgagctcgaccagtcccacgagcaagtccgtctttattgatgtgtgtactttgtcggccagagctggccttaaggcttcaatgacaaaaggctatcagggccttgaagcagtgagttaaacctgcaaagactgagccagccgctacagccatgacgacaattcttctcatggaagttgtttagtaaaatgatttatttctaactaaacattgaactaaatatgtatatatgtaatgaacacagattacttacattataaacatacacgtaagatatggcaataaaatggtttttttctgagtaaatgtataaatcaaaattttattatatacattgaaatacatttggctttttcgtggctattttatccattcctccattccttaaagaaatggttattcaaacagcttctctttcctatgcattttgcagtcctaggtgttcaatattgaataaaacacgtagaacaccacccccccccccagtttctacaaaaggtagcttatctaggaaggttgtatttagcgtaacttacataaggacaggtagactcataaacgtaattaagtaaatgtttccagcgggctacggagctataaatgccatgggaaatgtaatgtaaatggagaagaactaaaaacttaggctggcagatgctaggaatttccagaaaggaagtcaggcagtctttgttgtaaagaaggccctagaggcaagacttgaagatactcatgggggcttgggggtgcacagacaagagagagcacacagagggtggggagtggctggaagatccttactgctttccagcaatggctagatggccagtgaggctgctgggagggacaagtggtgtggtcaggggctttgtatagttttcattagacacagtggcagatttggtcactagagaacaccactgccagccattttggcgttgacataaatttttaaaaagtgtaacttgttatttacagaaaactgtgtttaagaactaactacatacttataaaaaattgcattatctattataaatttaattctttattttgagatttattgcttttctttttctttttcaggtaagtctggatactttttttcccccttgtggattgaaggtatggtgttaatttgccctgaattttattttcgtttctcttgacacttcacaagaaagttcactgtcgttactgtagcttagaagcaatgctgttggtttccattacttggtttggatgtttgtaagtctctgcagtgtcttgtgcttgggtgtatgtttaaagggttgtataaactgtctggccaggctgttgcttctgtgtatctttgacgggggtggggggtggaagggtgatgaccaggattctaatggaaatcagatttaaagttagaaagggaaaatgcattcccttcttgagaaacattacgaaaagcttgaataaactatgcagtggtcatttcaaacgtgatgggggaggggaatttcaataaaggtacaaggtacacgaaagagccatgagaagacctgcgatttgaaccagataagttgaatagccagtgacgttcccacacagagctaccaccttctcttggtgccctctacccttgatatacataaaataccaatcgcataagaattgcctcaaacacaaattcagatacactctgtatttgtaataagtggtatattagggtacagaaatactgtgtgtatatctaaacataaaataatgctttctttctaagtgtataaaaatggaggtgttgatcagttgtgttccggctaatcaataatatatggatgctgcagtttgcatttagagtgtcccgaaagggctattgtaataaagacgtgtctgatctagagagtagcagaggaacctttaaaagatacatccctgtcatacttctttgggtcactgggatgtacccttaaaaggggtgctggaacttgaggccttttctgccaatgagtggtttggtttgcccacagtccctctgaaatatgctgtctcacccaaaacaacagggctaactggcgtggtcaagaatgcccccaaactgtgtgtaacctttctggcttggctggttgtctcgggtacaatcctaaggacaggaagctgctaccacagtgagttagcacaaggatctgaaagtttgtctggctctggtcttattgggtgaagacctttgatcttattttgttctttctgatataatcgcaacaaagtcatcaggatcaggtgtatatcatctcagtgagcacatattacaagaattatgacagctcgcgtttcattaaggaagtaagtgcttggtcaccgaaccaaaagccaattgcctgacttagaactatctatttttactagggtctcgggggttgatagaaaggaatggcattttttttttaatttctaaaatgttaacagtctctaacgtaatactgaattctctggcccaagcaagggtcacctgatgcaaatccagatagtaaaagattttgcactgtcagccagtaagtcaatattcaactctgtcctgaagaaaaaatgcagttgtccacatatgaccctttagagggctgtggcacatgtgccaataaggctttgttcattaaaaatgaaggcggcaggcgcggcaagatttgctcagtggtaggtggtattgcaacttgactgttcttgtgaaacgagggatttttaaattgcagaatgaaaagcaaggtagtcccatctgaactctgagttaaccttctccgaagtgtttgtgaattcaaacactagagggcacaaaaggatatgtttaagtcaaggacttctcttcaacagaacgttacaattaggaaaacctgcctcaagtaaagccttgtgcccccatgggcatgatttttctgaaatgctgacctgcagctctctagtcctcacagagcacaagaaacggcagcggctgacttctgggtctctttaataacaacctcctggctggctttctttccttcacttttatcgctctcagccttttataaaatatggtccacataactactcatggtgggatttttttcattttcctatcgtataagaaatcactgtcttgttattctcagtactgactaattatcatggagtgaactccctgtaacacacagcaagttatgtcaaatgatcttacatttgcaaaattttttaaagtatgaatcatgcatacaaatgtagtttgctacattaatttttaagctaactcaaggtattcttcttaggaaaataaataaaaatcattacatacctcaggctctaaaattaagcctatttttttattattatttctgctttaaagggtttgaattttagagatcttttgagactttaaaaatataagtgttcaaagataaccatccaaaattagttgtactatggatgtcatggaacataaatataccatatgaactaatgtttagataaattttggtattgtatcaaggcatcaactactaattttattttcacatgttagataatatgaggaaatgcttcttgtaaaataagaagtagaatagaatctaaaattaatcacagacattaaaaatctcaattaaatattaaaattagatgcataaacgcatctgtttacatacaaaaatgaaaatgagccagatttccaatttagttctagtagggatgattttcatttctcttgttcatctcatttttctgtaatttctaaacatgctttcatgaatattcatcattcacattgggctaatgtgtgttgttcaaacaggagcctgttttagcatcacaatgtccgtggttttggacatgatgcttaggtcagtgctagagacaaggatcagggtatgagactgcattctgcttcagagactattggagtggaatcttgtagccaagcagatacatcatgagaatcaacctgctaatcccagagggggatgatttgtctcaggttctacattgtggaagagtgaccatacactgagaaaggagagtggccagagattggagagaggagactgggaaagcaaggccagcgagaagagcatataaaattaatatctagtatacgttgtccctgtgctctgtggagagtactagaacgtgtcaaagagagatagtgcttgcttagttgtgttcttgaccttcctcttcctcttcttcctcctcctcctcttcctcctcctcctccctcttcctctccccctcctccttcccctcctcctttcctcccctcctcttttcttcctccctccctccttctctccctccctcctttcctccttccctccctccttctctccctccctccctttccccatnnnnnnnnnnnnnnnnnnnnnnnnnncttcctttctctctcatgcacaatccctctccctaattctctccctcctctctcccattatacatctctttccctttaacacacaccccattcttgtctttccctacatatggacatatgtgcatagaagctaaggacaggcaacaggagagccaagatctatgctaagttggacttctagacccaaaattcttaagaatgtcctggcacacagacaacaagaagtctcagaaataacatcgcacaaagcaaaattttaggacacttcagttcactgtttttataatttttttaagtagaatgaattatcttctcagtatatagaaacttttcacttttaaaactcatttttagagctgtaatattttaaagcttttgaatattttaaagattgagaaaactggacaacttgatggactagtcaaaagctggaacagaaactaactagctttaggcgtttgaatgagatgttccccataaatccctggcatttgaatacttggtccccagttgcaggcactgttgggaacatgtaggagttgtggcctttctggagaaagtatatcactgggagtggactttgacttttaaaaaaatctgcatgtcattcccaggtaggtctctgtttcttcctggtggttccagatgtgagccctaagctctcagcaccccgcccacactgtacctaccatgttacagaatgtatcattctctgtaagccccaaataaaccctttcttcaagttgtcttggtcctggtgtgttgtcaaaacaatagagatgtcactaatacgctcactaactccaacaaacaactggcgtgggacctaaaaatacagagctacaggctaataagccttaggtctgtggcagctaggtgcttgtttagacattccaaatgatgtaccgaattgtcagaaagatcttaggtcaggtacggagaatggcactagatggttactaggaaggctgaaggtagcccaagatgatctgaccctggacttgtccattccaaaccccctacagtcggtcattgatgttttaatccactcatcaaccttgccgaaggtttagtgaagaacatagcctctttccagcaacttttgctcacgtatctctaagttcttaaatcctatacattttttttactcccttttaaaaatttaaatgaattgacataaataaaatgacagatttaaatagtcatttggacttgttttttaaaacaaacagataaacaatatgataagtgtgtgtcgataccctcaagtgataaatgcatgatcacatctatgaatcagtctcagccaagttcaagtacaaagagagttgtgagaaccataaggatttgctactgagcactgtgtaggtggaaaaatgggtgagccagcttatctaagctaattgccaaaggaaacggaggagcttgagtcttttctggaacaaaacagaattaaatatttattacattaaggaaggcagagtttagagcaaaataatgaaatttcctgcgactgtcttttttttttcattccacatcttatccacttattcatttatttacattccagtcattggcacacacactcctactcctcacagagtccaagactgtcttctaagaacgctgaaagaattcatttcacatgtgtatttagctttgttttacatggcagtcccaggctctcaaggccacaggaagttcagagtccagcagaaaactgagcatagaatgttttctttctgtacacactctttcaggtaacagaagactgcaatataccttacattacactagataagaaagagtccttgctcatcaccagaagccttgggtgtggtcaatgctttctcacttctgcctctcacctgctcacagtagcattgccctgtctgtccttaattcagtgcaatagctatgcattctcaggcaaggggtctaagcttttcacacctgcaatgggtttactcacaaacccagaggcaccctggaaagaaaggtaaacaatcctagatcacatctacagttagaacaaaaagcttagctgaataaaatatatgtaataatatagccatctaaaacctatgttggaaaagacatcacgcagtgctatgtgctatattggagaatggtggtggggtgtgagtctgacctcatgctgtattctctcatgtgtagcatccctcttgaatccttgtcgatcagcaattctcaagctgtgagtcgagacccctttgggggtcagatatcagatagcttgcatatcaaatatttatagtaagcttcataacagtaacaaaattatggttatgaagtagcaatgaaataattttgtggtcgggcataaccacagcatgagcaactaactgtattgaagggtcgcagcattagcaaggttgagaaattctgcttctttctttcattaatctgaaacctttggggggcacctcacttccctccccttttggttgatattactttattgtgctaaagtttctttcaattcaaagttgacatatagttgtcatcaccattgtctcttcctcctagagggcaatcaaggaaaatactcagtgtcaaacttgagtctccacaaacatggacacacacatacatgtgcatccacacatatatatatatgcacccacgtataataatacatatacacacataccacacatggacaaatgcaaaaattattattaaacttggtgaaactatttttctacatttcctaaaatggcctatgacttcctattatacttattaattggagaacaactgcattgagtgagtttctgaatagtgaaatagatctgccttcctagaataagttcagttgattcatgacacttcaagtatgctctcttcacacatacctaaacgaattgtgataatcttagcagtcttgtgtctattaatcaagtctaatggtagttacttcctttccatagttcttcagggtacagtggcctagactggaagtcatgctcttagaacatggagtccattgctccaggctcttctggctttcaaagcttctactgagaaatctgctattattcaggagggttcttcctttacatgtaacttgttactttttctcttgtagctttcagaaccgtctttgttctgaatgttgggtattttacctgtgatgtgccatgggactttcttttctggtcttgtctatctagtgttctgtgaggggttcgtctctgtatggatgtatctctgcttactttggggacgttgtcttctgtgaactgactgaaggcctggcctatgctggagacatgaggtgcttctcattcatctatgcctagaattcagagactggaccttcttatagtctcccacatcccttaaaagttcttttcttgtgtgtgtgtgtgtgtgtgtgtgtgtgtgtgtgtgtgtgtgtgtgtgtgtgtgttttaatgttctttgaatgtatggtctagcttctcactttatcttccaatcacggtactctatcttctacctgatctgttcttcttataaggttcctcctgctgcttaggttggagttattgaggttttatttccatcatcgtttcagcttgagttctacttctttattgaattcagttttcagatcctggattttctttgtcacttcattcagttgtatgtttgtgtcttcctagacatcatcactcaggcatttattgctacttttttaaaaaaagttcattgaactgtttgtttgtgtcctctttaaactccttgaattcttggctgacatttatgattgttctttggagttctggagtccgtctaggcaattctcactgaagaacattcatacaggactagcagatttgggagagataagttgtcttggcctttcatattgtctgtggtttttacaataaaacatgggtttgtgatccaattgctgtccttgggagtggctgttgtaagatttcaaactgtctcagactatgccagagaactggctatacttcaagacctgaaagttgggggtaccactgtcaggagaggctccaggcacttacttacaagggaggatctttgaacatctgatcagtctgggctaggcccagagcttagctatggtgctagccaacccagggtgaatctcctctcctcatcagtctgagcctgttctctttatagcttgctgactctaaatttttaatatgaaaagacagtatttaactgtggcgttgtgtataattttcagtattcaattctttgtcttgtgaaatgggtaaaaacttttatgagagaaaaaaagagcaaatgtcagaaatcatagggacaaacatagatacagatttcctatttttaaaagttctttcaagacattgtcattaataaatatagttatgtggatcatttatgcaagtctttaatttttttaaattcaattgtgtgtgtgtgcgtgtgtgtgtatgtgtgcgtgtgtgtgtgtgtgtgtgtgtgtgtgtgtatccatgtgcagaagacaatttggaggaattagttgtctccactcatcctcaccacataggtcatggggatgtaaatcaagacttcagataggcggcaagtgcttttagcagctgagccttgtctctggcaatttgtgaatatttaatagtatcacgggttctgtgttgtccatatctgcatcctctaaaggactggaagttggactgggtgaggaaaggaaaggaaatgcccagccgcagggatcgctgtgaaaccctgtcttcactagggggcattgtgttaactttcagttctctgtctctttctatctgtctgtctctgtctctccctgtctctgtctctctctttgggtctctctctatctttgtctttctatcttcctccctccctctctgctgcctctctgtctctgtttctctctgtctcggtgtctctctgtgtccctgtctctctgcaggagaatttctttttagacctggcaaatccctttagacctctttctctcctttcctttgtccctaccatggctgctggtccacactaggaaaccgactgctctctcctttacaattctgcttctgtagacctcaccatgctccttctaatttaattttagatcacaccactataagtgctaagtgatgtgaggtcctgtctggtttctgagcacttctttcagcacctttaacatctcggcaacttgtgaaatttctctgagacatgactaatttaaaagagacccaaaggtctttgttcatgaccttttgttgaaatctgtctaaaactctaaaattcatagtgaggaaaaaaaaaagtagctttgatgctcaactttttattaacatatatccaattttatctgtacattacagtaacgtgtagtagttgtcagtgacatgacaactctacaggaaagatcatgtacaaatttctatagttctattgcccagaaaaaaaaaagtcgatattttggcgtatattttaattagtaaatgatttttgagattctactcctagtctccttttgataatacacctcttaacaaagcattccctgtaatgtttcaaaatactctttacaatccagtggcatcatactgaactgttctactgaatgctgtaagcctacatccttgagtgttcccaacgagtcagctctctgcagttgggatactccatagccctcagagcatccctccttggcagcttcttccagaaattgctagagtctctgctcattcactggatcccttggcaatgagacagattccaacaggctgagcgtgttcaggggtcatacctgccagctgttcacattggtgaagactaacctgaaatcccctgagtcttttaatgccttctgactgtgacctgcatttgttagtgctgagaagtgacactgggctagctggcacaataagagcacaagacaggactgctaaaaccagtagcggcaaaatgtgggctttctatttattaatcatttgttcacaattagcccaacatttataacaagcttacatacaatataataagggaaaaggaaaaattacatgaagagaaaacacaataattctcatttattaaaacatcctttattgtttgaattttagggaatattttgtgcagtatcaaaaactggaaaatctccatatatccattatccagtgcttgactgataatcaatatttaccaagaatatcagtatttactaagaatgtccctgtatcaaacaattcagaaagcatgttacataagaataaactgggttaaaatcacagggtagcagctttttatcacttacctgcatagtgatatttaaaattcataatctttgagtgtgcttttaacagttagttacaactgatttatttttctaagtaaaatttgggaactcataatttttgcattttgcaatacaaaaggagaaaaaaagacgcattatttttgcctgtataaagtacagcctttagaataggttccataagaaaaagcatgggaaattataaattatgctcaacatgagataaaattcataagtattattaatttaatagtaacttagtaagttttagttacttttaatttgctgtgataagacactatagccaaggcagagtctagttgcagagagcatggcggcaggcagccatgacttcgaagctcctatcttgagataaccaccacaaagaggcagagagggcactaactggaaatggctggtcttttgaaatgtcaaagctcatcttcagtgacccttccaacaaggccacacctgctccaataaggccatatcccttaacccatcacaaacagttctaccagggaactaaatattcaaacattagcctgtaggaccattctcatccaaaccaccatatatattattataacattgaaattcttgttattcaggtccaatctaatggtgacctgctagagataatctcccaagggtaactggtggagtttaagagatagagttgttgatactctcaggaaatttccttagctgttctacgtttctgaaattccaatagcgctattttgcaaaatgaatctcttttttgaaccatattataaatatttagtctcaacaagtttgctgttccccatcaactttggactacagacgcctgacactcagtgtattgtagcttttcttgggcctcctagtcatacttacagtatgctttttttttttttctttactggtgaaatcaagatgtaggtgggtggtggttgtggcgcggcggtgtaatgctaggtaccgactgtacagtgaagcgttttctatcacatgtttcagtgacattttcctgagaggatattctgagttcaaagtgtctgtgaagggcaccaggtctctctgtcccttcagccacttaacactgaactaaattctatctgactgtgaagtaagaacttgagaatgtggttttaagagatgtctgacagacagcaaacagttgtcctacccaggagtttgtttttagtgttgatgagctgagaaacaactctctggaatacgcaagcagtcacttagcagagggagtctctaatatattaatagaaacagcctatcctctaacgcttagcagagacctgggatctctatcaaggccttgttgctcgccatcatcagacgcggcaaaggcatttaatgtctctgaacaaatgaaatgggaatagcatggaatcagagctcagggccttccctactgcctcattaatggcgattatatcaaggtctagctgtgaatctcttgggtggttttcttttcgagagagagctagacctcaacgttttgcgtgtcctgtgatgaattaagaacaaattagcaaaaacaaatgattaggtgtgactctaaagcagatgtcggtgtttctttttttagccattggtgagctgccatcattggctacaccaattaaaaagcatttctatttctttcccacgtggaaaacgccggaccctgagcagcgcacacaggctgatgcgcatgcgcttcagcctttcctccgggcgggcatcccaagttcacagtctctatggctcttcatgcttgggcccactcaggctctgccttcagctagtgccactccaaactcagtcttcttccaggagttatcaattgaaagatcatttgccatcaagagcaaagccacgatctagagatgaacggaactaacctgtactcacgtgtctgtcatcatagactgactttatgatagcagaaacttaacgtgtctgagtctcagtgctgacaatagtggctagaggcattgtctggctgtgtaagattaggtaactgttagccatggtgtctgtctggttcctccccagtgaaaatctaaaacttccgccatgattctgccatgatttgcctctccttcagaggagccttctcgcattctttactttctcggcacatagactgtaggtttttgtagggaacaggaccgtaggtttaaccttgcatctgctactccttagctttatgctttcaggaataagttattcaaactttgtaaacctcaatttcctcggtgatcaaacagaataaaagaaattggaagcctggaaattgattattagggcttatataacatatctcatgttcttattacaaaatgagcagaaaatcattattgaaatcatgctggcaggatgaggaactagaggaaagtcatctgacagtcagctggtttttgtttttgtttttttttccattcaatcaatgctcaagatgtatcctggtgcaggggggtctgaaggagatggccaacagctagggcctgagaacaggaaagtttatggctattggcgtataaaaaaaaaaatgttgtggaaaaatttatgcccccacaattggacacatgagattgttgttatttagaaatctctggtatttgagctctttttgtcttagtcctgagggagcaattttgctttgcagtctggcaattccaaaattgttttgctggtttgttagtatgggtctgaaaagtgggaagacatcgtttctgaccttaactggtgggcaggcaacaagtgggaaacacagtcggatccacggttgtaaattttttaccaactgaacaacctgtgctcatagcccatatgtttttagacagggagagacagagagagagagagagagagagagacagagagacagagagacagagagacagagagacagagagttgtttttacatttgaagcataaggcaaaacaactagaaaccattccatcagctagttctggtagtgtcctatacaactcctgagtcgttctttgttgtttttattcagtctttgtaaataagacagggataatttcagttttgtaaataaaacattaaccctttaagacttaatcccgtaatcctattcttacttaaggtaaaaaaaagataacaaatagagaaacaaagttatccctggcaaggaaaccttgatgcaaaggacaaaaaccaaaaaacaaagaacaaaaaacaaagaagaaaaaacaaaaaacagatcaaatagaattttgtaaccaattttaaaggatgatttttaaaaaatgaaaatgcttttaacaggataaaagtaacttctacactctcctaaaagcttacattgttaatggtggagtccagagcacatgtgcctgtgtacatgcgcacatgcatgtgtgtgcctttgtgcctgagtgcatgcatgtgtgtatgtctaggatgcttttatgtaaaacacatttttagtcctcttaaaaaccctgcaaatggtctgaagtcagagcagatgggggaggcactgaaacccagccagaccatgtggccctctgtgcatcactgtagctctgaggaccatttgcttggactgtcccctcccctcaacagcttcctgatggtgtttcctttaaaaaatataattcttaacggcacattcttgtaacaataatttggatgtaatagtgatggtggtcttttttacttcattattttattttattcaggaaagggaaggtaataaaaatcacacacacacacacacacacacacacacacacacacacacatttttaatggctgagctattttcctagcccttcttccaactcagtttaagtctttaggagttccattaccttatcagcaaaggcttaacctgattatcattcaaattgccaaatcatttctatatatacttcaggatagatagaaaacttgagtaaaggttttgctccacaatccacagtggaaacggtccattattcttatatttaagtatgactattgcttattattttatgcagtgccctgttgacttcaacatttccatggcaatttatttctttaaatcccggcacatataagagagtaggatacatttacggatgatcaaaatacaaaccacactcctctgatgctctcaactgcattccagcacataaagtaattggtcaccatttcagaacatgcaattactgacctgtaatcaaatggaactcacgtaaggtttagaatgatcatagtttatttccacagatgaaagtgaagtgcttgctgcagaataatgctaggattttctttgaactgcagcacttccattcacagaaataaatgatcactgctgatcataaacaattcctgtaacaaagctgcttgtaagccacaggaacttgtcttgcatgaacatttgtttttaaaaagtccctgagagtggttaaacttctttttcttgtatgtttctgtgactgaccactctgaaaatgtaatcttttaataattttatttttttaattaaaatccaatccaatcactgtctccccttttcttccttcgactcctcccaggacccctccctctaaccactccctcacctctcatccttcgcaagccaatggcctctccttttttttctttttttttttttttgattcctgttgttatgtataacactgaatctttctttttcattattactattatttctagctgtgggtatgtgaaaataactgattaagagccccatcccaggctggcttgttcccactctggaagcagtccttatatgcctgtagttctttgactagggagtgagaccccaggagatttccctcccccttccacattagcatatctattgtcagtgttaggatcttgaaactccaataatataatgctgccctcatcagaggtagctgacagttgcacagctaatgtttgcttctataacttctagctttgtgctgggcgtggtggcacatgcctttaatcccagcactcgggaggcagagacaggcggatttctgagttcgaggccagcctggtctacaaagtgagttccaggacaggcagggctatacggagaaaccctgtcttgaaaaaccaaaacaacaacaacaaaaaaaacttctagctttgagtctttgaccaacaactgtttcaaaatacagcattatcctgaagcccctttaattgactgttctggtttcctgaggcagcggatttcaccataccgcagccccgctattgtaactctctttctctggtctacttcccaccctctacacctccccgagtcctgttcactcacgacctggtatggaagtaaatgaatgcatgtgtgcttacatttaaattccgccatatttatacccaggagtctcagtttaacttagagtggctgtctccctataaaggaaattctgagtttctaggtcagacaccaaaacccaaatctgtcatttgcagcatctggaatcttggaacaaaacttgtagaactgttccaaagacagaagaagaagaagaattaggagaagaagaaagctttatttagagcgctgcagagtataaggtttaagttgctgcaggaggtggctgttgaggaggattgggagccgtgtggataacaattggctcttccatttactgggataaatttactttttagggttctgatttgcttagtttttgtttgagaattgcatccatgagtactgtatataacaacagaaatttaagaagaaacagtttggctttgtaaaaattaactcaagtattttcaatgtttgactctctttctacccatacaaagtgaaagttataagttgctggcacaaatataaatacagcaaaggtacattctagaaaacaccctgtttgttgggctttgatttttccagttgcctaattctcatatctgtggagtaatggccatttctaaaaaacagtactgaaatttgcattttattttattttttaaaagacttatttatttattatatataagtatactgtagctgttttcagacacaccagaagagggcatcagatctcatgacggatgttgtgagccaccatgtggttgctgggatttgaactcaggaccttcggaagaacagtcagtgctcttaactgctgagccacctctacagctgaaatttgcattttaaaatataaatttagcagtgggcatggtggggcatacctttaatcccagcactctatgaattcaagtatagcctggtttatataacaagttccaggccacccaaggctgcatgtctctaaaagtcaacaaaatataactaacaaactatatatgtgtgcatatgtattacatactgtgtatgagatgtgatatatgattacttgcaaaaaactttttgagactgaatgataaggcttatgttattttcaataaaactatgtaaactacaggggagaaaaattgacccaatggctctgtggattaaagttcttgtcatgaagcctgatgacctgagtccaatacctaggacccatgtgggagagagagagagagagagagagagagagagagagagagagagagggagagccatcttcttcctaccagctgtcctctaccatgtatccgctgcccagacaccatacaccaatgagattaatgtaatttacaaatgaaaaaaataaaaccatgacaacacacaacatctgggggctcagaagctttctacatgcggcagacatcagtggtgctgttttacctgcaaagcatatgatttctgtaaggaataggtttcaattctcttgtgagagatgaaaagaccagctctactgggattttcctgtttctgtgtgttcttctcccttcatacccagcctcccctttccatgagccctcaagatccctctctacctgacaagtctaccagttttcctacatggccttgctctagcaccatacaaagccattctgctaaacaggagttgtctatctctgtggtgctacgtcaggagtggggcagcattgcccaagagctatccctgatagaaactaatagatcaatgggaaccaagaggcaactgtggagtttcacacaacgtaaagaccgagggcctagggatggctgttttcttccactcctaggacctgccttccgcgtatgtaatatagagccttacccaaaagcacaaaggccatttgtgaaacaatcatatacaacaagctgacccccagaagtcttcttttagattggaactttgaacatcagcgttattaatctgccagacagccaccactcacctactgagtatgtgagtcagataacgaaagaacacaactggcaaaaaccttctgtattgcacatctccaaagcatgtagctttttcagaaacccctcccctcactgtgcccgatgctcagcttgtttaacattttaatgcccccccaaatcacgagagcatggggggggaggggctggagagatggctcagcagttaagagcactgaacactgactgctcttccagaggttctgagttcaaatcccagcaaacacgtggtggcttacaaccatctagaatgagatctgatgccctttctggtgtgtctgaagagagtgacattgtactcacatacataaaataaataaatcttaagcctagtgaggctgggatcggagccaggaaaaaaaaaaaaaaaagaatgttaagggtctttaaccctggtaggcatggagatggtcccttagggcgattagtcaattttgtccagttcagagggggttaacatcttttttagggtttctccaagcttctctaatcttatcctggatgtgtagagccctgccttggtttacaatggaggtcacaagcaggccagtgcttgggcagggagtgatggaattaggctgtgttgtcagcattaaataccactgactcctgagaagtgatgacgacaccagggtgccttgagtccttgaggacaccttgaaatatatgtctccctgccgcgcgcgctgaactctgagaccacacaactgagctctgtggatctctcagcctttatgtgacttgaaagaaggacgttttaagggatctgttcaagagcgaagaacgggacaagacattgatctctgctgtcaaagtcactccttataactcactctgcaaggtgacacagtgacatccctttgagggaaaggttgccaggagttctgaaagtgatctgcctgttttcatctcacactgactggcagggaggagaggggttttttttgtttgttttgttttgtttttaacaattactaagttttttttttacaaggttttctaataacgacattcatacatgtatctaagagaatttagaataagaaaaaattatttggatagccagagttgaaatttaatactcctgtcaagtttcccagtcctgggtccatgtgtaattttccctttcactacaggtcactactgtttaacattcacactaagagtaagttgacccattgaaccacacctcccagtctgtgcatctgcatgtctgtggggggtggggtgggggctatgcttttcaggagtggcatgtggccctgctgtttaagctgggctatatttaaaagcagtttcaagggagttgtttctcacactaacaagagactgtctaggtgaagcaagcgctgtcgcaaagggcaagtgtcacgcagcaggaagtgctggccaccctttccagccctgcctcagccagcctgccacctctctgtcagcacataccaccacactgaagaaatgccctcattcagccacaagtgcctcttgcagcctgaagggccttcccgccccagggtccagtatctgctctgacattctgctgttcctgtggatctcttagcactctctttacaaatggcttttgtctgggatcccctgggagtcgcagtgccaggaccatctccaagaactagaacaagattgcgtttctcaaagtcctacaggtatggcaatttccttttggtagcaagggaggcctttttatctgctgtaggtcccttacaagtaaaactttgagggaatctccttcattcacatggttgggttaatgtccggctcagctcctgggctattgtaagcatttgaaatagtcctgggtttgtggggacctcctgaggtcgcaggaagttgcccaactctcagagcccattctgagagttgaaaggtaaacttgacaaagcttgtcagttagttacagttctgggattggggggtggggtgtgtggggggtggatgtattccatttgcctaatcaattcctgtcttggaaaacaagcttgctaaactgtaagctaagtcttttaactactcagaacagctgctgatttaattcgcccagcaaacaatagcaaactacagggctgttattcacagggcaaaacccacattgcaaagctgaagctaactccgtgacccactgggtgactcactttaaagtttgtctcaaagaatgagataccgtaatttcgaagttaaggtgtaaggcgtattgcatttctagtgagttctctggaagtcacataacaactctcaaccacatgcctactacatattgtcaactttgtttcacagcaaaggctagttaatgttaaccaaatacctggctgtactgctgctgggagctgatgcagccacagtaaataaaagggaaatggtttgcataatcttaagaatgggtctttgttatttaggtcagctaccaacaaagttagaaacttatacagaaatacacactattttgtttttgtttttagttaaattacgttctatgttgtctacagagaaaacattttaaatttggattaaaacattaatgattttatttgttgaaaaccagagagaaaactttcaccctagattttttttttaatgaaaacagctagcgtccgtcatgatggtattaatttattaagacatttggtgaacgttggcaagccagcgcctgtggcaagtgtgcatgaaggaatatgattggcttgcttgttattgacatgccacgcctgattatgtgtgttgcatgcccggaacgtactatcaccaagcctccaacattattgtgtccaagatgtgtggcttctaggtttttcttaccatgtagatctgaaagcaagttctttaacactgtgggcatctgcctgcggagtagagggaatagaagaaagctgcggctggatgaactgaagaatctggcctaccctttaaagatgcagagttgaagtggtacttgatttacaaatgagttataaaatctccccgccaccaccacctttttttaaaatcaaaggcacagacatttccttgtttcaagctctggtcttttccaaatacgtgacctggtctaagtgaagaggggttctccattacctatgtgtcccacactttatttctgacatgctttatttagagtaaatcggaggctgaagatagcacctccagtagctgtcaagggacaggtccctccaggaaacctttgtcactcattcatttcctctccatctgtcaatcccttgcatggtgacgaattgaattcttatatacattgtgtttgttgtgatgggatctgcatcatctttcctttggagtctgtgacttccttaggtaggacacagccattcattccctctcccctggtgtcactgagtactgtgtgcagccctagctcttatgttcatgcctttcacaaatcaaattgaatgagatgataatacagttgcccacccccagagtcatctcagctctctaaaagattaggcatgtagcccagtgatatgggataataaataaatatatatatataaagctatcatatagctttacatttgaagtagagtatacactgagtcactacatatctatagatgcatgtgtatgcacacatgcaaacacacacacaaacacacgtgagcacctgtgcttgcacactgcagctacgtctgagaatgcagttgtactgcatagcattctgtgaagtcaaaacaataaactgctcattaaaaatatttaaatgtaatttaattttaaaccactttgtgaatttccccttttttctttttaatacacaatagtctttaaaacatgaaaataacatgtttcccttgacctttaagagatgttggatatgatttcattattgaagcaagtgaaagacctggcccctagccagtatttcttcattagattcctcccatgtaagattattttttctggaagacaactttttggtgttttgtttttgtttttcaagacagggtttcttggtgtagccctgcttgtcctggaactcactctgtagaccaggctgtccttgaactcagaaatctgtctgcctctgcctcccaagtgctgggattaaaggtgtgcaccaccactgcctggcaatatttatgtttttatatttatatagtctgtaatttttcttaactgtgcatagtattgcatcatgcttttctttgaatagcaaatgactgttactatatgatacagatggcacatggagccttaagctcaaatgcatttctttggctaggtttccacttcacgatggcattcaggctaaaggaaaggcacaaatttagctaatgggtctgatttgttaaagtggtagaaaagactgcacatgtggtaagtatagtgacccttgagaaataacctcttggataattacacaatgttcaaaatagactgggaattagattttcagtagtgacaagtcttttgtgaacaaaatacatttttgggaacagaacaaagtatctctatatagccttttaaagaaaatctgaatccatagaaggagagaaagggctgagagggctcagtggctcaaaacccatatggaggaatgagagaaatatcaagtttgtcctctgtcctctatgcatacacactaacctacacaaacacacacacacatacacacccctaccttctaaatagataattgtcataaatgcatgctgttaatatggagagcaaaagacagagcaaggtcacagaagtagaggaaaaagaaagagagacgggagcgtgggggtggggagcagaggagcaggacagagttacataacagcaagctctcctctgtggagtaagaatggagtgccaatggtgcttaaagccatgcggtcactgtcagcttcagggagctgcttccaaaggtgacttctgttttcaagggcatgctacgattgaccctaggtcgtgacctgttgtgtaagagccgtctctctagagaggcctctcacgtctgctttggagaggagagaagaagagactagctttgcaaacatgttgtgtatatgacttctttgggtgacttaaacgtagtctcttgagtaacagggccgggggcccatgataggagacgctggaaatgaatcatggggcaaaggtttaacaagcttgggaactcagagagctctagctggagaagaccaggaaattggtttgcttgtttgcttgtttgtttgtttgctgacttgaaaatgtcagtgttgaaaattccagtaatgctcaaaaaaagtaataaataaaatctctcctgttgtaaagatctccctgtcttcccaccaggaaataagataaaacattcatcttcatggcttctcagtaaagattgttgacaaagacgggttgcatggcaagccatggggtaggtgccttgcacataaaagtctatggaaggaacaatcaagtatatagcacagaggtgactctgcagagctacacgggttgaagcagaaaaatggctctgactgcactgccccctgtactgattggatcataaggtactctactatactgaaattcttggaatggcgaactcaactttgaaattgttttagcaggattgccaagaccatgatttgtaaaacacattgcgaatattttacaccacacagtggtccagagcgttgtgcactgcctatgacgcaggtggtcttgtgctatgaacacataaagtaatacctgcttaagcaaaaaggtgtcaatatgtgaagcaccgctccactctgaaaagcaggctctgatctgtctctttgaactgtggggtttcacagcagcaggggtaagtggggctcgtaggaaaagtggtgtgcatggtactatacctaagaaatagacaggaatcggtaactgtggagtcaaagttgccaacgtccaccttcaaacactggctggaacccttctcttaggatgggagtgagcgctaccagcatctctggagacctggagacctggaacattattttctaagtccaaggagcagctaccgcatatcatggctttgatctgagagttctcaggtggtttccactgtttctggtgatcccccagctcatctcattgaattccttggagtgactcaaaagatgcacacagtttactgtccaatcctagagagagggcaggagatttggaaaccaaggaccaggtgtcagaatgtcagaagccagaataataggagctaagcagagtattgtggcacatggcttttatcctagcacttgggagacagaagtaggagaatttgtaagttcaaggtcagcctggtctgtaaagcttgttctaggccagctagggctacccagagaaaccttgtctctaataataataataataataataataataataataataataataataataaacaataatgataatagatcatgtatagcaggtacatttatatacatttatgatataagaattggaatacagaattagaatattgtaatatattaaaatgctgtaccaggcagtgttctactatattataatgttctagtgtggtctaggacccctggggcagctgtcccagaggtattcattatctcatgcctgtagtcctaccaaacagccacaggcaacaaatcccacagcccctttgtgctatgaatgaagctcaacagtacatacaagcttgctcgagggtgaactgtgacaggccaccctacagcctggacaccaaagaacagtcacccttccaccttccactaccccaggaggaaggaaatctgtgtgagttctatagtctcttgaaatcagaatcttcccctgagtaaatagcacctcccactttcatgcaatataggaagataattattctaaaatatagttctggtatagtattatttatagtatgtgatacatgatacaatagactatatagtataatactatatataagatcttctgatatatatcatccaatgatcattccatattctaatatatagagaccaattaaaatataaaatagctaaattatatctaaattttcttatagccaaattacaatggcttaaagtagtgttaaacaaagtcatcaaaatgaaagaataactgtttccatgcctgaggtctaaagaaagaagccagagccttgtgtgcatcctgctactacaccagatgcccagtctcaaagtatttcttatgcagaatagatagagggatgaaggagcacaagaacctgacagatactgcagatgggccataaggaacatgtaggggggagtgtctctctctccacccacagtggtctggccacacagggctacagagtgagacagaccttgtttcaaaaatagaaatgggggctgggcaggtggctggggatgaatgaaggaaccaaagaaaggagagagagaagtgaatgtagggaaggaaggagtgagggaggagaggggagggaggggagnnnnnnnnnnnnnnnnnnnnnnnnnnnnnnnnnnnnnnnnnnnnnnnnnnnnnnnnnnnnnnnnnnnnnnnnnnnnnnnnnnnnnnnnnnnnnnnnnnnnnnnnnnnnnnagggaggggagggaggagagagggaaggagaagggggggacagagcactgcagttttatgtagtctctttctgtttcctccctgaggtttttattccgcctcttggacttccagctgacttttttcatctaaccagcacactagtcatattgtaaaatttagtcgcaaaaagaaccattgcttcttggccagctgctcaaagaacaggagattcagttagggaagtcggcatcatcccccagctgtatacccattcttctagcaccatcctgatcattaagctagtctttttattgtaccccaaattgtgagtaatatttactaaactgaccatgaaaacaaccaatcattcataggccacatgtatccctaataaaaatgataatattttcagtcattggcattatgcaggggcatagcacagactaggtagttctggcccttgaaccaaaccccaagctgaaatgccatccctgttgatttctcagctgggccgttctcctggcctccagaaacccatgccatgtctataaatggagaatgaaaacacctactttataaggtcattgtgcagattgagcaaaaatatgtactccaagacaggccttcctaccacctcttttatagcaatttctacactccacttgtcacttcatgaattttgagatgtcccttctcaaatatgtttagagactagctgccattatggagaccacttctggtcccagaatcctataacacagctgacttacagaccgtgtccttccaggcacttcgcacatgctcaccagtttactttagaagtcagagggagttggctggcactcacaccgtcacactggagttaaaatttccacatcattacttacagacagctatttgacagtagaaaaaaaaaatcacttaactccgtgcgcctcggtttcttgtctttatacagagtgtaatgttgactaactgtgctggctgtgtaaagttcccagtgcataaatagaactgaggtaaatgttagctattatcaattctgggacataagttttgcataatagtgactttcgccttctttgttccttctctgtattccattccttggaagggtgtttggtatatatgcattgtaataattttcagaccactgtaaagcatggggcactctgattctctttgttgcatttacggtagagaaggactagtaatgatgagactggactgcgcccttggatcgattaagaacccctaagctgcatcctgtaaaagtctctgtcccttctgtcagccccattcaactcaatgctaaagccatgtaactcaatactttcagtcaaacagccaaggcagtcacttgggactcacatggttgtgttgtgtagtctatttatttaccagtagcaaatgttgagtggttttaatatgatttatttgatcttacctttctgaagtttttaatagttgctgattatattaacttataaatactcctaaaaggtaattggctcccagcaactgtgacagaccatttcagcacacccttatgcctggaaaaggttcaccttatgatattgttatagtaagaagtaaaatggatggggtctttatagaaaagaaacatattaaacaataaagaaaaaaatagaatctgaaaaggaggttttgcatgggaatgtcaggaaagccttcatcaggcaagtgatcatttatgtaactataaatcgaaacacccattctgtatatctatgaatggatgtgcagttcttggtgtctaatctgtaactcagaattaattgccccttgacaatggaacggtctggaaagcaatctcacctgtgactgtgtccttagccaggtcagactgagagctcgtgagtgaatacgcttttgcttgccttcactcgaaaatacaaggagaaagaggagggggaagaaaaaataaaggagacattcgagattattttctatgtgctttctgctactttatttcttatactgctccaaaaggttcacacatggaaatagtaagtaaaatactaagaagtgataatttaacacatagtattaagagtttgggtcttgctaagtctttctgtatagtgtaaggtcagcgaggtaatgaattctccatttttcaaggtaattatacaagtcaggattggccatacatacttaaaatcccagcacttgggaggcaggggtgggggtgggggcgggggcgggggcgggcgcaggggcaggggcgggggcgggggcgggggcaggggcaggcagatctctatgagttccatgccaacctggtctacataggattaccaagcaggaccttaaaaaaaaaaaaaaagcagaaatcatgcaagttttaaatcttacgttagaaggaaagttggctagaccaaactcttctaggacacatacattttcatcatggatcctgtaaatattattttcttaaggcttgtcacttgatcccttttggcaattaccttgtctttaattgacttgtggattatctagtgaacattgctgtgcttaaagagtgctgtgctgtggtttgtttatagaaggaagcaaaagagaagagttgaagcgagaagctcaaatctataaagtattcttggttatcaggactttattttttttttcttttttggataacagcattgtttagaagaggatgaaaaattagctgaacctgatccatgttttcatccaaaggaatgatttacgtcctgttgaacaatgacattaatctgatgatgtaaaagcagtttctagtgatagggtggtcactttgggagaaagataaacataacaaaagacaaagaagccttcctgtcatctctgggtagacctcaccatgtctgacacaaagctctcacgcactgtttgcaggaaaggctcctgctctgatctccctgctctaagcgatggaaataccttgttactcatactcagaaaacagcctcatctcatgtcttccttgtccttggaagatgacttttccccccataactttgcctctttgctccttgataaaaacagttgagatgcctgagcacagatggcagagagattgtttgcgtcatcgtctgtgccttttggttccccttatgaagagaacagggcaccctgtacaaacggttgggttatgtgctgatttctgacattcatgggggaaagaaacaggaagttcctcttccctaagcaaatccatgtggactgacacacctcgggcatcagggagatacacggttcagaaacactgagaaaggaaaggggaaatggctgtgtagggaaggatagtttccaaaagtgtaatgtttgtattcattctgcatttccttttggtacagtattttgcctactaagttgtacggcccttcactttctatgggattagttggtataagatgtgactgtgctcctgttgacaaaaatgcatgcgactgtgctgactcacacaaacagcacaacaccctaacaacaccctaatctccaccatataatatttgctcccgaggacgctccctcacgacctactcagggcagaagataattcctgtcctgatttcttatagcatcagtatgtggtgactggtggaggctggggtatggctcagtgggtaaagcatagttggtatgaggacccaagtctcagtctctagcatccacgtatcagtaggtcatggttgtgttcagctgtagcttaatgaagacaggtgatggagacgtggtgaacggagacaggattatcccggaaactccctggccagccagattaaacgaaaccaacagttccaggttcagtgagaggccctgtctcaaaaactaagatgaaaaaaaaataattgaggaagacacacaatattaacctctagtctccatgtatacacacacatgcacacactggagataaactttgcaggaatgcagttgccacaacaaactttgagggttttgtttttgttttgttttgtttttttcttgtcaattttgtgttctccagtctcttctgcctttctttgcatggttgtcggctcttctgactgtggtggccctccatgaaacagccaatagcaatttgcttatccatcctattattaataaatatttgtatactccagtttgaagccactgtgactggacctgtaccgaataattaagaacaagtgtgcaggtttgtgtacatacacagagaaacaaagtatgctctgaaggatagaacctcttagttgtagtctttcatttgtttcttgacactgccaaaggtattttaaagtactgcaactttatttatagcccccaagtaacattctagctttcagcaacctctccaatgtataggctatttgggtttccattgtcaatgtgagcactttaatgactgcagccattatggttttcatttatagagctgaatgctctgatatttgtccaggaacagcatgggtaacagtgaaccatttatagtttatgtctcctcatcatgaatggtacattattgactaaaaatgagtatattgaaattaaaaaaaaaaaaaacttggtcagttgtacaaaagtggaattttccctctgtttggcccatattcaatattttcctagttttatttctgttgctataataatgtactctgacagaaaacaacctaagggggaaagggtttattttggcgtgtagttccggtttgtagtccatcgatgtaagaggtcaaggcaggggctcgagcatctggttatgtcacatccaaggacaaagagaacacattcatgcatgcttacccacgctcggtattctctctgtccttgcacacaattcccaggattctatgcccagagaatagtgtcactcactccctgtaagcagggacttctcctagcaatcatgaccattccctccagacaccgcctttggccagcctaatctaagcaatctctcctggacactctcttccctagtgattcagcattgtgtcagactgaccaaagctaacctctaccctcagtttaaacatataatcatatttttacattgtgtcaaggttcatttcctaacccaacaatacccctaattatcaagagggatgaaaaaagggttcatcttattttataatttttatctctgaccttcagttctagctgcaatagcctatcaccatgttaaatcaggattttacttacatctcagaaaagttgctttagaccggatctaaaccaccccaacccatttttgaagcacccagcaaatatagggttaatgtgccatggtgcaggaaatgtgtattactttttcattttttttttaatccacgtatgcagagccttttcttttctatttatttatttttattcttcttcttcaatctttttcttacagtccagttgttatctccctcctggcctgccctctgactgctgttcctcatttcatatctcctaccctccggatactcccccaccccccaccctcccacccccactcctgtctccaccccactagacctccccactccttatggcctcaagtttccctcctgaaggttaggtgcatcttctctcacggaagccacaccagatagtcctctgccatttatgggggatgcaggggtggggtctcttatcagctggtgtatgctgcctgattagtggcacaaagagccttttctttcactctctccccattccttttttgttattgtaattactattttccagtgtctgggttctgttgctaccacaccctccaccttgctatctcatgtcctctacagttcatcatagccccaccaaggatcacagcctggcttctgccatacccaataagtcaagtatgttgtctcaggcttagcttgtaccataccaaatgtgatcatgaatttctaagcaatgcctgcagacgtctaaacgtagcatggatggttactctgaatcctagttcttgtagctttcaaagtctagtcctacttctagctaaatgtggagatgtgcacctgattccagctcttgggggtagagacaacggagctggggagggagactctaagccaaccgtaggctacacagaaggaccggatcccaacagtatcaaatgactgtctggttcatggtacattgaggaataaataagaatatcaaaccgggcagtggtggtgtacgcctttaatccgagtgcttgggaggcagaggcaggcagatttctgagttcaaggccagcctggtctacagagtgagttccaggacagccaggggtatacggagaaaccctgtctcgatacctccccaccccccaaaaaagaatatcaaggcatcatattctagacgtttgatctcacaaagcaatatatattgccattagcacactgattattcaaaatcatttatttttaagtacacggttcttatgggaacagcaaatgaagaagtactttgtaattcagtaaattcatcatttctaccttgggaggaggtcttcaaggtgccattgcacttaaattgtgctttcagagtgttcacaagtaagacttttctgaaaaagggactcttcatgatcaacattcctcagtgcctaattttctcaattcatttctaagagctgttcattctctctggtcactcagtttccttctcatattttccaaatagtagattcagcagctaatgactttctcagtgacaaaggtgatgtggcgaattaaaatccacagacttgattccatgcatttgtttgattctttgttcactgtgagacggtctcactgtctccctgcttcagactcctaagtgctggagttacagggccggcctatgccagctgtgtcacaggacctaatgtctgagccacgttctagccactaagttgttgagcaaagtcactaaagcaaggcaggattgtcccatgcttatcttgaataccctgttgttttagctggggcaggggtgacaagattcaaaacatctcaatttgaaaggggagagaccaagatgcggatcgttctctaagcagacgcctaccccctatattcactgactgtggccccttgacacagtacactttaacctccatgggaaacttaatcagagactgtcgtgagtgatgtgaccaacagccaatcaaaacctcagaaaacagaataaacagaaagtcaggatgtggtcatgcaggctgtacgttgactttaggaagactctcccattcttccttttaaatcatttaacatacatgattggatatctagaacaggagccgtgggaactacatactggggggagcttggtcctgtttatcattttgctctccctggtttagagtgacggctacagaactgatcctatccattcacagtgagctagacagaaagttcttaactatggggccaccgaaaatctttccagcctgctgttctgcatgttgcatcgagacagcatatggttttgatacgcaaatccaatctgagagttcattcatgtactgctctgtaattgaccatgcaaattgcaatttcctacttttaatataaactttcctcattgcataaatgaagtacctgcacgcattcccttggctccgctcatctgatcatcataatagtcagattttagtgggagagctgcagctagctgaagcagatgtccgcactgtgacaaggtatttaatttctcaggtccttcgtctttttattggagattcaaatattcccttcttccctgaaacagcatcatagaaaaatgagacaatttgatgtgtgcctaaatatttcaccacaaatcaagcacatattcatgaagtcaataatgcccagggaagaacaaagggtagttcgatgttaatgtctctctgaacttgtatatgattcaagtatccacgcaagtatatattgagtttgtataagttgttacacagctcatgctgtacactatgatttgtgttatttaaatcaggcgttaaaaatttttcatgagtggctatgatactaacaccatttattttgaacaccaaagcatttgtttgtttgtctgtttaacgtgtgtgtgttttgcctaagcatgtatatacgtgtaccaaatgtgtgcctggcactggaagaggccagaggaagcatcttattccctggaactagaattacaaacagctgtgagccaccgcattcgtgcagggaaacaaacctggggtctctgtaacaacagcaagtgctcttgactgctgagcctcatccccagccccactggcattattctttttaatgaattctagggagcataggcaagagaagcagggttgtgtggtctggctttcctgtaagagctcacagtgagagccacggaagcagagaataagtggtgatatctaagatccaggaaatgctggtcagacagacttccagttacgtaagaggaatcagtttgtaagatctgctctgttataacgtgtgctgtctatagtgagtaataaatatactgcgtcctgggaaatcactgagtatatttaagagttccatccacagaataaatgtgagttgatgcacgcgttagccacattgctttagacactccacaatagatatatgtgttaaaacattacattgtatcctatgtacacatacatgaatatatttgtcaaatactttaaatgaattttaaaatagaggtgagtgcaaaaatgaagtctaggtctttccttatatcatattttttttaggattctaagaaagataagtgtgagattaagttagatacttacttgcctcacagattcacctggttcatacacctccttttcatcatttaaactgtagcataacaaaatatttagaaagctttgctcattctaaagcttcaatttatatgcgggggggggggatgtcctaataaaaattacacaaagaaactttgtccagatttggttattgatagttaactggagaaaagggtttctcatctcatagaagctactagaccacaaaatatcaacatcacagcagagtgaatgtcctggaggaatgggcagataagaggaacccccatacctcagactctggtatttgtcagagataagcaataaggctaggctttcagttggttgcgccctagaagaaaataaaaggaaaggccagtctgtgtgtaaatctatacccttactaattcccccacttctaagatctccagagatctttgaagctgtaagaaatacaagaattgtaaatgactaattccaattagctagcaaactgttaaccaaaaaaaaaagtaggttgagatgaatttaagtggttttgtcttcagggttggttgagctgtgacgtctgtttcaagtcacagatcctccaagattcctgtgatagtgcgcatctggagtctgaggtactcagagagctgagtcatcccagaattcatgtattcatagcatgcttaggaacacttaggaattccacctcaaacaaaacaaacaactcagaacgtaaggctttttgggcgtttattaaatgtcttgagtatgcatttttagccgtctgtgtacccagacacttaatattgagtataatttgagacgaaagctgcatagcctgccctttaatatggtcagttcatgatagttatcattattcaaaagaataagctataatatctgtgtgtatgtatgcacctgtgtagcgtgtatgtgtggatgtgggtgtgtagatgtgcacacatgcacatggaggccaaaggcctacatcaagtattttatttcattgctctccatcttgtctttggaggtgaggtccctcactgaacccggtgactactggttgctttgactggctgcccagcaagtttcaagacctgcctgtcactgcccctgcccttccccctccccgccagccctgggactactgcaatgcacaaccacacccagctttttattttccacatcaggtctggggatctgaactcaggcccccaggcttgtgcatcaggcactttactgacagagcccatccccgcattgctttaaagttcatgctattcaacaggggttaaacactataacatttgtttatggaacaagactaattttctacttttctattttaactgtcatacatccctttggagttgatcaaagccatgccatttatacacacatatgaatgtgttatgtgtatttggatatagtccatatggttatatatgtatatttatataactgttcagtagcttcactcagaaaaaaatcatatctactgacttttgctgaggtctttaagtcctagatgggtgctttatgtataatcacaagtcaatattctttatggaaattattattttatttgaaatcactactattagcttttctacttacagaatgatgacaattctggccattctggtttaggttatcctgaggcactcaagtggttcttggcaggtagcaaatttttgatcccactgacacagaacttctgtgcggttttaagatacttaactgttggattagcctccagattacccagggtccacattgcaaatggctctctctgctgggagtccaaggtagtaaacacattgtatctgtgtagaaagaaggatggggatgaaggctggatgctcatctggactgtgttgcctagcaaaataactactgcccactacgctcaaaaaaggaggtatgctgtacatgaagatttgaaatatttttatagactgggtctttctttctttctttctttctttctttctttctttctttctttctttctttctttctttcttccttccttccttccttccttccttccttccctccctccctccttccttcctttcttcctcctcctcctcctcctcttctttcttcttctcctcctcctcctcttctttctccttcttcttcttcttcttcttcttcttcttcttcttcttcttcttcttcttcttcttcttcttcttcttcttcttcttcttcttcttcttctccttcttcaaacatctgatcttctataaatactctttggaaatactggaatagctgaaacataccccctgcccctgtcttttagacaagttttcagtctttagccccgactgaaccacttcctggaatgtgctttgtaccaagatggcctcaaatgtgtgtgatccttctgcatctgcttcccaagggcttgaattacacacatgcatgtccatgcctggatttatccatctgttgttgttgttgtttgttgttgttgttgttaagagacaatatttctatatagcccaggctggtccagaactcactatgtagagctgagtaccctcaggctcttgatcctcttgctctggacttctgattgctaggattgcattatcttaccttataagcatgcactacacttggcataatctattaccttctatcatttcatgttattgactattaaaagagatggctctgaaaatataagatatttagagaaatatgcaatttgctgttaaggtagcttgcttttagatcaattggagcaattaaacttaggactgaaaaagataccaggaggcatatattaagtacactcgaatccatagtgaacagccagagtgactcactgatgctgatcacctacaactcagtttacaatgaacaaggagcagggcttgtcttgtagctcgagctacgggtctcagtaaaaagttaagattcggagagacaatggcaagatagagctgtcgtcaccattcgatatcaaaacaggaggttcgtactaattccataatgtacaaatgtctcatgaaatatttactttgtttaggttacttgttaattttttgtgttttgtataagttttgctaaatggttcatctgggaagataacaagagactttcactaaaaatggcaagagttggttatttggctcttaggctggaatcgacatttctcgggattcacctactctctggctgtttcctgggaacaagaaactaccagtccacccatgcccaccccaacacacaacttgcatgtagccccctgacatctgtcctagtgaagccttttcacgtctgccatgttccaatatacactcttctgctttcctcagagaaaggagccgcttaggtgcccgagctcagggctaaggagtttcaagagcgaatgccaggcaatctgtcaatgctgctacacagacacctttcagacagacaccgccttcagatgtaactcctaaaggaatcctgaggcagaccgaactgtagtacgatatcaccgatcccttgtgttcagcgtgcaaaattatgtttgctgagatgtggctttttttttttttcatcatgaaagccctagaccattgcacacacagaaggccttttgccttggcaacgttgccgttggccggtgttgggagcctgggtgcctgttgatcattgatttcttaatacccacagagctctggattcaacattttctctataaagcaagactttgtaagccttaatcagcttacaagttgtctgtgaggaacaaacggaaagtacttttgtagggagggggataatataatgaggcaacattttggggatatggcaaggattaatacagcctcaaggccttcctgggaagttgttttcaacatttccatggaaacgcacatgaaagcagtggttttcacacttatttttaacctgtgaatattccaagtcctaactccgcaatatctcttcctagtaccaaagaaaaaccttttacaattgtgcatttttaaaggatttgatttacactttaaattacgtgtatgtgttgtgtgggggtaggtatgggcagacacggacaggtgcccgaggatgccagagtgtcagatcgcccaagcttgagttacaggctgttatgagtcctgtgacataatagatcctggttctccacaaaaatcaacacatgctcttaacttctgagctgtctgtccagctccctatagtcatccatcttgaaaatgccatgaatggcttggtaggtggtgggcagtgtttacaaagggtcaaggcttcccaagccatccagactttgagcttacttcctttgacctcttgatatttccttagaattccccaagtctcactttggagaaaaacaaaaaaacaaaaaaagcaaaaaccaaaaccaacaaaacaaaaaaagatgcattaggttattcaattatagtatacagtgtagtagaacaaaatggaattcctaattgagttccgtgattgctcacccaaaggagacaaagtactcgagatgtttatgcagacagcatgactcatcgcttattagctgggtctaacacctgctttgtgcactctcttcccgcctctggcttggtgtccttatctgtatacccagtcataggctggtatgtgaactaattgcaaaatgctgctgtaaggcctggcaagtgctacttacacggtcagtggcagcactggcagccatcatcattagacatggtgatttctgagtgcctttctcttatgctaataatgtctttgtaaagatgtttgagaagtgttctgaataagaagaaaaaggaaacaggtatcaactcaaggagcacgtgagccttatttaccaacacagtagcaaatgcatcgtctcctggattctgtagaatgactgagtcaggaggtttggtgttggaatgcttcctccctgtcaggagggttcttctctgtccgctccccacatctttgctcctcaaagccaagacctcatttagcttcatttttgttgcccatgtttaccttggcagagtctactcagagaaaataaaaagtgtaacaactaaagtatgacaaagccattgatgatgtgggtcactcgtcgagttcttgtacaaggtcctggatttgatcctccaggtcaatgaaaagcagcataaataagcagttagacagaaatgaatgcctttccccccttaggacatttgcaatctattatgagctaagcattgagcaaaaggactaaatccctagtgggctgtctttgatttgaacaaccaagaccacagagtatcttcatgtactggtggaggggggcgctcagcaggaagagtacagagcaatcatgacctatgaaagctggtgtaaaatcgtggaggagaggggataagaacggaaggcagaagagaaatgaagaactccgtgtcatctgattaagcccacactaagcctgggcttgtgccagacatttttggtagtgactttcacaatcttcaacagttctgagaagtgactttattatccccgtggcaattttttttcccccacagctgtgaaaatagaggtcatatggatcagtcaatgggctgagggttatacggctcagaggtagctaatgagctgaactttgaacccggggttgctgggatcatcatcagacttttgttaactatacctccttcaaacaacttacagtagggtccccccccccaaaaaaaaaacatgatattttaataaaaaagaattttacaaaagcagatctaaaatgggtctatagagtttactgaggacagttcagggagtttccacaaagggtttcctctgaggctcacttttcctggctgtctggcgctgtgaaattagaccttccctaatggcttggagctgagtgtatccttttgtctgtgaagggcaactttaagctcgttgactagtttatttcaagcttgtggggaccaattccaggcagcaagctagtactttcagacttcaaattagcttgcttgaacatcccagcaaaaggcaatactagtaaattgatattttagagtgccatgctggcttttcttcactggtctggttacctcctgaacaaatttgttctcctagtggtgttcagcttgttgatattttctgtattcttggcttatgcctgagaatcttctggatatagtcacagacatttagtctagaccatttttctcaaaattacaaagataggggaaattgcaaactatagctatgccagaaggcttagaatggcttaggaatatttttctggagccctttgaactatttatattgtttatatgaatattactactgttcactggcacattttgttttctatgtagtgacaggattatagaaagtttgtcatacagatattctgttactagcttttcctcctttcatctttaggaatttctcacattgtttcactgaaaggtatgtgtttgtgtgtgcatgtgtgtgtgtgtgtgtgtgtgtgtgattgggatgtgtgcacccagatatcaaagaacaatgtgatataagatactgttccttaggtacctccccatgttttttcatttgcttgtttgagaaagggggcaagggagggatggagagagggagggggagagagagagagagagagagagagagagagagagagagagagagagagaaagcgcaatgagctcaggggtccatctactttcctatgtttgagatcacaagtatgaacaatggtggttcatcttggtttatcttgtttgtttgttcaatgggggttctgagaatctgaactcccttcccaagcttgcaaggctgacatttactaatcaagtcatctccctacccacagaaggatgtgttttattggaacaaattttcatacatatatatgcagtatattcacttcttattcatctgtccaataagtatcacagggaccgaaaaacagcagaattgtttctcatgccctgggcctaaggaggcaacccaaggttttcactattggcctttctttagtacctgtgctctggcaaggttggctttggctttgaagatacagtagagcccatacatgggagtggaggaggcaaatattaaccagaccagcctgccattacatgcatagttaaatgaagtaaatgcataattaataaagtacacagaatgagaagcaagatgccaacaagtgaagggtccaatcagtatgtgtatgggaaatcaaatcatctaagaagacatactattatgagttgaaagtgaaggctaaccagatattagccaagtggaagcagactgaacaatgtatgagcacctaaaactacctatccaaggacgtcctgagaggatgagccaggtaacctctatcactctgactaaaatgtaggagatagataaacctctcctccttgaataatagacataacaatgtaattagttaaaatatgggggttcagttctagggatggagaaaggtggggaaatcttggttaattatattgcccatatcaatacatttctatgttccttgaaaagttaaataaaacattgtggtgccagagggtgtttgggaagcatcgatttccccaatggactcataaccaacatcaagtcagtatacaggaaatccaatgtgctttcaaggcaaaccaacttccagtaaataaattcaaataaactctcttagatagactctttcattatcatataattatataattataattctagttgctccattcggagttgctaatcctccaactgtcattagatgtctttggaaagaatgcgatcacatcaagtttatggtaacattcagcattttatgaatattgtacctaaaaaagggtccaatatcttagcccgaaacacatgatatctttatcattcaaataatcagcaatgtttttccatctcaggaaccttgattttgcaccaacataaataaattctccaggtttaaagatttacatatatcctttaacagttgtattgcttctattgtgagacagaaaaataagtatttacttaatgagattactgtcctggggtttcagaatatgtataaaatataattagaaaattaaaattgaagataaattttcatcacctgaaaaaaaattcccaaggggttatttactaaagaatggtgaattcaatagatcaagggagaaacccccggggagtgtttcattagaacactttaaaacacagcagggctgaaagcaacatctttccaacaaatgaatcctgccttaggctgcacacattacaaaatccaaagcccaaagagaggcattcccaccacgattttaattacactggtaatgatctggagagaggcgccacaagcctccccagtttccataggaaatgaacttgattcttgtcagctatgggtcacagttctgaggtcttctgcaatggaggtgtcaaaaataacaaacatgtggatctcagcatcccctgccattgtgtctgggccttcttcaatgggaaataaatcacaacactttgcaagcagacactgccacaaggtttcatggtagcgtatgattgaccttgtcctctctcgcttgacacatgcagaaaatagttaataagccatgtggacaaaagaaaagtactgctgttcacccacacagagtgaagccatcaaggacagctgaggggtggttcatctatattacaactgctaagtttgcctcttctgtctccttttgaccaatagaatgtggtctacagaatgagatctgtggctttgtagctggctaagtttgggttgagagaatgttctatggatgacgtgattctcttggtggaaaaccataaatttgaatctagggtgactgtgtctttctagaattataggaaagggaacttgaaaatgtaagtttggatgatatagtacttaggaatgagggatttgtgagggacagtgttgctttggggtttgaagagagtttgtttacaggatgaaatagcctttctacaaatcaccaatatggatctggaaacaatggctctctgagtttaaaatacatggcttatagaaagcatgattgttaaaggttgcaatgcatcccatcaaaatttatattcttaaatcacagcactagtatctcagaatgagactgagtttcatgatggagcattttaaggagtgaatttgtaatataaagtcattaggtaggctgcaatccaatgactgtcatttttttcaggaaaagaagacaaatatgtcatcttcacacttacacaaagggtacataggcatggtcttgtaaagtggaaggaaataaggggccacctacagacaagagagatctccagaagaaactcacctactgagaccttaatctcagggttttcctctcataaaccctgagaaaatatgttactttagcctggtttgacatgatagccctggtgctacaatgaccaagtatcatctcgctttaattagtaatgtaacttttagactaactcatagaggtaacatggggaggggacaatatcaggaaacatattgcaggtgtccatagttaaaattttaaggttctgcaatggattgatgacagctgaactcccaagactgagacctaggcaatatggactgttgatgatggaaatgataagtgtagtttgactaacatttcccccccccaggaggtgctgtcttcagcacacaggcatccatccattcaagcatacaaaagtctgcctctgtcaaaaagcttggtgagcctaccaagcccagaaatactcatcctaaacagagaaatgtcgtggcctgaagagttcacgagccagtgtttcagttcctttcaaacggtgtcattaattagtctgaattggtggtttctgtgtatacatgcaagtccaatatcagaacaaaagccttcacgtgagaaccaagtagcctaaatagatgttctggttctgatgtcgatctaatgcttaaaattaccctcggaaacaaacagttgttttctctacgttttctatggatgtggtcaaagtgtgaaagttgaagagcaaggccaactggagaagataaaaccgtgacttggcttcctgtgaatgctcatgtctgagatcaaattctttctcaagcacaatacttagttagagagtcaggaagaaagagggctctcagacagaggcccctccatctacagtagctcatcctgtgcaggaggaaatgataaaaacaccaggaagagcaggttatccgaggccagctcagggacacaatataaaccacctcactacacttgaacatcggatttaatgaaccaagcaagagttggcttcagtcatagattctgctttgtgccaggttgtgtttaaaagattccctttggagaattgggaggaaaagggtaaaggattttttttttaagtcaagaaggtgctctttgcttttattatctcttattgcagaagggtctgtccctctgattccccaagactaacacttggccaacatgctctcatgaattgtttacatcatccattaattaaaatgatgaatctattaaaagcaggactccctcttcctgatgcatgcaccatcaccaacctttaaaaaaaatgctgcatggtttatttataaagtggctttggcttgttaataataatgctgtgtaatttgtagattactttttgactttgtaaaaactgaaatttagcattatgtttctgcaaattaaaaaaatctcacagacatctgcctgcctctgcctctaagtgctaagattcaaggcatgtgccactatgcctgacaacagtttatatatttttttttaaagatttatttatttattatatgtaagtacactgtagctgtcttcagacactccagaagagggcgtcagatcttgttagggatggttgtgagccaccatgtggttgctgggaattgaactcaggaccttcagaagaacagtcgggtgctcttacccgctgagccatctcaccagccccaacagtttatatttttacatattacttttattgatcacatttaatgtgtttgacactgttctgtctatatataaatagaaactatcagtgtggttagaaccactcaaactgcttggatattcagttgtttcataaatatgtttgcatgcctaatatactttgagtattattacatatacttaaaatgagagtctgccttcatgttttttactgccttttccttgaccctttacagttttaagtctaaattgtataattaaggaacacgaacaaacaacataaatgatgaaagaattctcaattttaaaactaaccttgtcctgtgcaagagtgaatacagatgtgtctgcactgggaacttttaaatactagacatgttacaaatcatgaccttcagacattactcgagacctagaaaaacttccatgtgagtaacgtattcctttgtcataaaatattgaagcatttcagttagtctttagacaaacgagatgaacgtgatcagatgacatcacttctgaagacagtttcttcttggagaaagccatctgagtatattaaattgaggtctgatgagtgagtacttgctaaaacttagtgctaggagactttctagccataggtctataaaacatttgtagcaagttctcattacggacatagctgctcaacttttggctttgaatccatgcttatccaaggatggatctgcttaaataaggaccatatcaataccttgctatccagtaggtgtacactcatggaaaaatcaccattgaccctaacaaatgtcatgatataatggggtatagtctgtgggaagtccggaggaagtcagtctccagttagtcggcctctttctccacctcaaacgcttcgatttccttgatgcaatacccaaagctgtgttgttatctagaatgagtcagttgatgactgaatgactaatagccatgcatagcaggccttgctcctagcactgaaaaaggggcggcaagtgcttgggagcaaggaggtcccacctctgaatcctcccagttggctcaatcagaaagcccgggcctatgatctgccaaaaaatatctggcaaaggcatcagttattattattattattattttttgacaaggacaaagatgcaattgacttgattcctcaaagagatttgtgagggtgaaagaaagttcactgtccacctttaaggactctgagcttgtaatgagatgatggatgggaaagtgagttttaggaatgcagtacaaacacaaagtcacttttcttcattctttcagtacctggagaaaaatggagaaacaaagagagccacacatgcattcaggtctcactctgtcacctaatgaagctctctgcaaagggtagagttcaaattcctgaccctgtttcacctagtgactttctgtgagacccagcattaatgctgcttctctttgttctcccacaatgtgcttctattacttccaagaggtgatgcccacatgagaacctatgttattgcttttggcaagtatacagtacctactacgtgccaggaccaatctcctgttacatgaatgctgaggcatttaatcctcaagacaaatatacgagtgatatgttattactacccccactttacaaatgtctgagcaagtgtataaaggcacatgctatgcctcaaatccctcagcaagtgaatgaccttttcaacatgatcttctgtctgtcatggcagcaaatgttaagagctctttgtatgctatgctatgctatgctatgctatgctatgctatgctctgctttgctatgctgggctatgctatgctgggcaatgctgggctatgctaggctgtgctgggctatgctatgctatgctatgccatgccatgccatgctatgctatgctatctcaaatacaaatccactactctcatcgtatatgtttcttggtacttttcaccagagatcagttcctaagaggcttctctagtgattaagcaggaaatatttctttcctcatttgtagactatttataagtcacaaatgtgtttttcttagcatttgatcttcttaccaaccatgaaaatacttatagctttatcttcggactacagagacttaatttaagaggcttgtagtaatcctgaaactagaaataccctgtcctttttggtggggaaggggaggtgtcaagcactctttctagcatatcagattggtttgtaatttctttcctgcaaactgtagagtcaacttgaatcttaaagcactccatcaaaaatggcagaagcatttttagaagaaatacttaaaatagtttgagcaacataaaagtagcagatgattgtgttggattgagagaaagcttctttaagcaaacaggtgcagctctgttctgtgtatcacaggtcagatgctcatttgtcgggttgcccgattgagcatcttcaacagcagcatcccaagtgcccctctgctctttcattacccacccacatgcttccctccatcctcggagctctgttgcttgttgtccacccaggcacaccccaaagaagacaaagatgactcaaattggtcattaatgcagactcacagtgcattttctatttttcagaagagtgaagcagggtttaaggacgattcagtttcatgggaacttacatttctactttagataaattacaattctccccccccccaatgcctctttcatagccagctctgtgtgtgtgcctgtatgtgtatgtatggattttagtttccctgttaacatgtgaggcagcagttgagcaaaatagcagtgtgtgcattctttaatggctcagagttccaagaaaaatggataatgctaaatacagggaaggggggagttagatgtaaaattacatcaccacaggtcctggtgcatgggagattatcggggaatatttaggaatctgaaatgaactgcctctcattgtatctctagaactaaaattattgatgctataaagtcataaatatgtaggaactgcaaaagatgacagtcatctagtacaaccctttgatattatttttagatgaagcaatagagactcccaaaagttatatgctgtttttttcttggcttttttcatcatacaacatacttcagtgatcacccatatgctaaatctgttgtacagggcaccgtgtgagaaaagggatcacgtgagagaagctggcagaagacctaactcagtgctacccactgccaatataatacacactctgtatgcagttttgaattgcttcataagccacatttttaaaaagtttaaaattgtgaaattaactttaaatatagatcgctcttaagttcatcttaactaaatactagcattttagcttatataacattgataaatagaagttgattaacttcaagttaatataaaattattagttattgtgtattccttttttagttctttcaaaatcagagcacatgttatagtttggatacatctcagtctgtattagctgcctttcaagtactgaatgtttgtccatgtctgttggacagcatggtggtgggatcatggtggaaagaaaagatcatgcactttaaagcttcaggattttattacttattttaaaagtttcattttaatgtaaaagcacaagtttaggtcacctcttctcaaattattgaataaacagagctttaaaatattggctcagataactgtagacaaaacttcacttaggtgatttggttattattttttttcttattctcattcctgattattgagtttatctacacacttgcatatacccacacatttctatagctggaagtctggccattaggaccctggcgaatgaacacaagactgtaaatgttggccagagactcagagaggtgcagctgaaatgtgaccagagccatcctagcactggaagcagcgatagacagatgaggtggctgctcctctgacccttggccagtagcttcgcttcactacttccgaaatggtgtggagagttttattctcctgctctgtgagtctcctgtttcctgtagaattgactcgggcattagcaggcaccctcccacctacatttggaaaaatacatttccagagttggtcttctatggaaaatttaaagcccttgaaaaccctcattgcagtgcttataggaactagtagaaacagaacacctttattgcttcccccagcagaagtgtttaccatgcagtgccatgcactgcaaatacacagggctggagaaacagcttagctcttaaaggttaattaagactcacaatggaaaagataaacacacacaatacagcgattggactctatcggcagagcaactagaagttacccggcaagtattagaaattttaagagacttatctgagatccctctgacaaaaacacacaaacagaattatggctgtattttcataggaccaatctaaagccagggatagctatgccatttccatgatttttcccaccatggatggaaaattcctgtcaactgagccagtgtctacagactgtgcgcaaatgtctgtttccttgccacaactgagtgtgtgaaactcttctcaattggtgaaatcaccatgaaaggtcaggagattcaggttacaggcatgacaggatccaattgcttccaaagtactataccaggaggataaacgtttcctgactttaacaccaagttagcatttcaagttttcagagttttgagtcacgtccaactcattttgttttaaagattattttccttggggggggggggcggtatgccttaatacgatgaagaagatatatttggatatgacagagatgtagagacagtgcctagcatcctgtaatgaacaacctccctctttacaattggaacacctggggaacggcgattcaaaatatgtatctttcatatttgataacctattcttttgcctgtatattgtcttaactaacaagtgccttaaaatgacataagaggtgtttttttttttaattgtcttttcaagacaaaggaggaagcatttcctaagtatttcattacaaaataaataatgagaaaacaatttgttcccgtgtaggttgagttaaaatgccttacatcagcaaacatcttgtgaaatgaagaaggttgagtttattggtgacttcattgttaattatataaataaaaaaaaacattcaaacattgtggaagaataaataaaggcaaatcatctcgtctgtatttccacgacattaacataattatgtgtaacaatccccttagtcctttatgcatattttctgtatgtgtaaattataatttgtgaaccttgagtgcaagaacaagtcttttttctccttttagaacctttttggttattttctttaatagattctttggcatatctgtaacagtgttagcctaactccatagcatacatgacagcagtggatgcaaggatctctttgtcctgcgttcaaagcaaagtgaattcctagagctttgaaatctcatcccctccatgagcttcatagccttctaactgaaaagtgcctgtctctcagcgtgggattttactaatttgttcaactgttttctacctcagtcttctcaggtgtgaaacgtaggtaacatgtatagcatgtgataggtggctgtgtaggtgttagtgctgtcttaatctcaaactttctccaatattataaaaaacactgctttgaaacagtcactagctttatcgactaaccatgttataattgtaaaagtgctttccaaggtgtttagcatcagtgcattaggaaagccatctctttctccaccattcaacagaactcaactactccagctaactggtagagaaataattgtcttattgtcttttaaagccccatttgacactgtcatacacatatataatgtactttatacatattaaccactgtctctctcatttttctgttttctactgggtcctgtttaatagccaccttcctatttttctaaaatctaacatattggaaaatatgattttttttctgagtctgatttttcccccttagcataattatcctcagttttatccaatttcttacaaataactgtgatggccaggcgtggtggtgtatgcctgtaatcccagcacttgggaggcagaggcaggtggatttctgagttcgaggccagcctggtctacaaagtgagttccaggacagtcagggctatacagagaaaccctgtctcgaaaaaccaaaccaaaccaaaccaaaccaaaacaaaacaaaccatgatggagccggagagatggctcagcagttaagagcacataggtcctgagttcaattcccaggaaccacatggtggctcacaaccatctgtaatgggatctgatgccctcttctggtgtgtctgaagagagcaatagtgtactcacatacataaaataaataaataaatctttaaaaaaaaaaaaaaaccatgaagggactcattcctatttttgctgaacaaagtaacactgttgcctatacactacatttccttagttcctagtctgttgaaaggaatctaagatggtttccatatcttctctgttagaaagcctgttgtgataaacgtggacttaaatgatctttgtgtcgttctgacttataatcattcaggtttatacccaggacttgtaggactcgtgctgctggatatgacattctggtattaatttctcggggaggggggggggctccatgctggccaatttacattcctatcagctgtgtctaaggattcctttttcccagcatcctcgccagctgctgtcctccgtctggatgatagctgctcactggagtgagacaggagctcagcatgattagcctcttcccaatagggatgtagaaggggaaagatgtaggacatctctcatatatttactgtgtctgtacttagaagacgtgtctttaaaggaagtaagactggagacaaacaaaattctgaacattctttcatctgatttccaagacttccaggccagacagcacaggcactcatgtgcttgggtggagtgacagagtcaagtgttatgacaaagggcctgtgacaatctgaaggtaggatgaacagtggagcctagtccagactgcttctggctctgagaatattaagcatcgtgaccttaggggaacctgtgtgaacaaaattaagggaaatgctttgggcggctttagagtttttcatttcctcccagcaatgcacagcctgccctcgtctcccaacatcttgatgggtgttcttgtagagtcttcctgcaggttcactgccccatgtctggaaaggtcagatcatgcacacaaggaacagagatgttctgagtcatttgtgcatacaaaagaagattctgccagacataatttatctctgtttgcctgatagggctgtggccctccctttgttagaccagtctgcctataattgtgaatgtctcgaaatgtgcagaaatgtaaaatggtataaacctaaaagatatgtcctaatagagaaggctattgcgggagtctgctagtccctgcctagaatggctatctaagtacagcagtgagctcattgattttgataatgggttgaaaagttagctggcctccctcccacaaaccgaagaaggcagataacgcttgcatatgtacactgtttggcctcttctactgacgggtgtgaatatgtttgctctgggaagggccttctaaaacccttctttggcaggggtctttgctttgacagggtgccaccatgccagggacttctcccaacacccaggcagtttcataaacatcacctttggctcagccacacacagctgtttagaggcagctggcgtgtggactggaaatgccatcagctactatatctcaagtaaccagcatggagtgacaactgaaggagacgatgtgtgcctttataccgaggccaccatcagtgtctcttgagtgaccgtagtctagtcaccagcgtagactgaggcagggaggcaagatttgaacctggcatgaactaagccacggaggtgtctaagaaggggtttttccatttctccacttctgtccatctacaaaggagcagaaacttccaagctgctaaagaagggaggtaacctgtccttattatagcatatttacctccgttgggctcagtgctgaggttacagcagccatcaacaggagttgagcagacccttcttcaaacatcattttgaagccataacataaggaatagtcacaagtattacacagaagaactttgggtaaagagccaaatgggttcaatcaatgtttttttttccccttccatctcatctagttaaaccaaccaaattactcattcaattagttactcagagttctggctaacgcttagggagatactagcaataagggattttaaaaatcaaagtccagtctacttgggctggttttatgtaggcatgatggaataggtacccaattttatcacagttcattctctgactcaaagatttttctcctgcaaagacctgaaatagtaacaatgacaaattaatccccctgtgccacgttactgcttttttcattatatatgccattaaaatataaaatgttgcacaaggagataaacatgagctcaccgatgcactagccactcaccgcaaatgagtttcttaaagattaataaaagcctcatactagtctttaacggtgctgaagaaagaaaccttgtagtgtaactactacctcaaaccccaaattattttctttggctttcacagaatttgtagcactaggcatgtttttggaattttgaattaagccaccccttaaaacagaaaaatctcatcatttcttcacagatgggaaaagttagctatattggtctattctggcagaggaaaagaataggctaaatgtcagttgctatgacttgagttttgtattttcagtatgtcccagtgccaccatcctgacactgaggataaaaatgaatcggcgtctgttgtcactcttaacctgtttgggtttcccacatacatgctctgcatgcctcatcccttcactgtagtggtcttccttctgcgataggggtgcaggacaatccttaaagatactactgtgcctggcccaggaggtagtggggcatgcatgcctgtaattgcagaactaggaggcagaggcaggcaggtatctgtgagtttgaggcacttctggtctacagagtgagttccaggaaagtcagggctactacactgagaaaccctgtctcaaaaacaacacacacacacacacacacacacacacgcacacgcacatgcacatgcacacatgcacacagaaggcattatatggaggacatgatgtttgctgaatttctgaggggctaatataagatcagaaaacacagagaaggtcatttgaaactgaatcaaatggttcttttgcttgtttgtttgttttaaagatttatttatttatttattgtatatgagtgcactgtagctgtacagatggttgtgagccttcatgtggttgttgggaattgaacttaggacctctgctcactccagtcaaacactcgctcaggcccaaagatatgtttattattataaataaatacactgttgctgtcttcagacacaccagaagagggagtaagatctcattacgggtggttgtgaatcaccatgtggttgctgggatttgaactcaggaccttcagaagagcagtcagtgctctttcccgctcagccatctcgccagcctcaaatagttcttaacctttacaaccagtagcctggagctttctagtttccagtttatgctaccatatgctacccaatttctagtagggccataggcaacctgggtatatgggagatgctgggataccttaaaattggtggggtggagttggtagcatggatgagaacatatctatcaaatgcctatctaagcagttctagataaagtaggtgatgtctctggcttcacagtttgtcatgggttgacacatggcaccccacagagctctcatttactgcagattccattgtgtttttcctgtccctctgagccagtgttgagaagctgagtgatacatactcctttgtcggagtaaaactgaaggttattaaatacattcgccatccagttgtaggaagataagctgggtaacagtcttgcagagtagctcttgatgaagaactgatcaccacaggggtgggggtgggactcttggtattactctgtgcctctttgacttttagtgccacctgaaagcagagtgcttagaaactggctgtattcaattttatagcttttgatgaatgatcaatgtttcttaaaagtttttgtcattttctattaatatctaaaatgccctgggttatagagttatatatatagagttatatcagtgatataactagaccagggtgcatctagaagatggaacttcaatcacactattaatagaagtcccaggtctggtttggcttcagaccccaggacaaggggctaaggtgagtattttacgtatcaaagcagacctggcttccaggttctcccagcatgcctcagtccctacctggtataccctgtccccaactctgaacttttcagctcttattttggtcttttcctcctccaccacctcctccttcacctcctccatctcctcctcctcctcctcctccttgtcctccttgttttcttcctcctccttccactcctcctcctcctcttcctcctcctcctcctcctcctctgttctactctgcctgcatgcactctgccctttctctctttctcttccccctctctcctcatgcctacttccctggcctcaatccttggggccaatgaactcgccctgagagcatcttcctaataaacctgcctttactatgttctgatctggcttgagtggctcatctcaccagctccacctgaaggcttcacctgtgtctactcttttttttttttttcctggtatgttacctgtgttatctaatttgactctcaaacaccctagcttcacagatgttatatctgatgagactgaggcacagagacaagaggcaagtaggtagttttgacgttggtagtatatcccccaaaatgttcataactgttatctaacagtactttgttggtcttttggatgtgctaggagtgttagacccactcattccacttgagatgtgtgtttatttaaaattgaaatctaagagtcacattgttgaaaaaccaaaaaaaaaaaaaaagtcacattgtctcaccaatttgagaaaatgagcagttcttacgattccaaaagcaccatttacatggtgactcacgttggtgatacacacgaagactgtgaaacataagtggaacttttaaatgcttcctcacacaagccacctgtgacttttctttccccaagtggaactgtttgcacccccaaacagtttccgcttagacctcccctcacttttagaatccaagatcaatactaagtgtccacaaataaatttaattattcaaggaccacaatgctctgtggagtgaattaaactcaatcaagtctttcctatttctttccttctttccttctctctttgacagacatgccaagaaaaacctgggcattagtgtcctcagaaatgatatctcacgtcaaaggcgggctgcttgtaggtataaacctctggcatagtaagcagagccctatggtgacctttcatggggtcctgctgagctcattactaaaatgactcacagtcacccagtggaatgcacccatgaccctacagccaaagtgccctcagtggtgtgtgattcccattgagtgaggagagccagtcaggcattgaaatctgacctcacagtctacctgtgctgtgcccagcccttttacagaaagacaagaactcatttgcgtcaccgaggccacagtatttccattatggagttgatttgttaagaaaaacagcaataaaagagaaagagagagagagagagagagagagagagaggagagagaggagagagagaggagagagagaagggggagagagaggggagagagagagagaaaacgggctgtcccaacttttattgaatatcttgtgtcattcacaaaacaatatgttccctttgtcttcagaaaaaacaacattcattacaaagaaaactattggcagtctcccttaggcacctgaggagaatgggagcgagccctaagctctgacagcttgtttgctttgtgccactttttctttgtttcctttccccttagtgcagtgggaacatagccctagttcagacctacatccgtgagagggatgagggatggccgtcttgctatgctggttccttcctaagctcagcctgcagggccacccaccacagtcaggtttcttggactcttaggtcacaagtggattgatcaatattttaggggaggattgacttaaaagtcttgtatttgtctgatcaatagcccaactgtggctgcttgatacttctatctttgcaatctcgtgtgttcagttatgagaaacaggaagagagagggaagcaggggaggtggagaaggacggagggagaggagaaggaaaggaaaggagaaggaaggagaagggagggagggagggagggagnnnnnnnnnnnnnnnnnnnnnnnnnnnnnnnnnnnnnnnnnnnnnnnnnnnnnnnnnnnnnnnnnnnnnnnnnnnnnnnnnnnnnnnnnnnnnnnnnnnnnnnnnnnnnnnnnnnnnnnnnnnnnnnnnnnnnnnnnnnnnnnnnnnnnnnnnnnnnnnnnnnnnnnnnnnnnnnnnnnnnnnnnnnnnnnnnnnnnnnnnnnnnnnnnnnnnnnnnnnnnnnnnnnnnnnnnnnnnnnnnnnnnnnnnnnnnnnnnnnnnnnnnnnnnnnnnnnnnnnnnnnnnnnnnnnnnnnnnnnnnnnnnnggagggagggaggggaaagggtcacagttgctggttataggaattcatgattgtgatcccagcaggtttttgctgaggtctcaggattgccctaagtttgaggagagtttaggcttcagagtaacatatagacaagcaagcaagcaagcaagcaagcaaacaaacaaattaaaaacttaaggacaacatcttttaactctcagaagtagcaaccacaggaagcactatctagaagcagcccaaatgtggccgtccacaagccgtccacgaattgcctcccaccagaactgccttccctacccactcttcctgaaccttgcaggactcagtgcctgccatggatctcagttgcctgcctctcgtgatctgtccattggcctgttgttgaaaacaaaacaaaaacaaacaaacaacaaacaaattcagcaactccaaaaaccttgtaaaaacaaaatcacagagctgacatgaaagttttattaagtgctcaaatcttaacactctgccaatgtcaatagtttaaagtggggattcataaaaaaaaagttatgattctttcaaataaaaaaccttgtgggctgacgatttttcatctcataaatattcccagaaattccagaagactgaaaagtagccagggtgcttcccttagtcatatctattcagtgatagccacagcatttaaaagtaaaattaaacgacctctttccagattgtatttttttccttagagcaaaaacaatgtgtactagggaaaatgagcctatgttaatctatggggaacaatatgtatggagcttaaggaggtgccaaaacgagagctcctcatttgtaaactgcaattttaaaaagctggtattttatgtcttttaaattgctgcactttggtaataatttgcagttactctaaggtgttcctttagaaaaaggttaatgagccgtcccctgagaagcccgagagtccatagaggaagtagttttgatccctgcgcaacccaactcactgcagaaatgtcagctaaaaaagagctttgaattccacaggctgggtgggagggtgcctttgtgcatggtctccatatggaataacattctgccctgaaaatagcatttggcttcatttcttcttttagttttccaggaggaaacttttgccaaggcccatgtttgagctccagctttcctgcagacataccagagagagcagcttctctcagaacccagctgacacaccagagccatttgtctgaggatctctgctctgcgttgtttgtgtgtgtgtgtgtgtttttttttagagtccactgaacgcttggaatgaatagtctgtctttctccccagaagagcacagatggatagaccaggtcaggttaaacagtgtctacattggctttcccagcctgcttcccaaagctttctgaacaaataaacaaacaaataagtaaactgtaaacactgtagacccatggacttagaaagagaatgcaaggttagtcattttaagggaataatcaatgtagtaaaagaaaacatcctttttttaaaagttgctactgaatagtacattttcatatatataaatatatatattatattattcatatatatataatatggtatgacacatcttggaagattcaacttctgtaattcttgcgcgcacccaactcgccagcaagaacgacgccacagcaggatccttctgcacacgtttattcagtcctgtttcttctttctctatatctcccttgtttatatctcccttgtttttatatctctcttgtttttatatctcccttgtttatatatctcccctgtttatatctcccccgaactctggacctctcactccttttatactctcagttctcatccatgcacagcaggccacgccacctcaccaggcacgcagcttcagctaatcagggcagcaggggcaaatctccaccaaattggattcacctgtatcctggtacacctgcgcagcactcaagatgtttgtgtcttatatgaggaagtcaggtgcaagtcatatgacttagctgcagtccctggcgcctttgggactgccgccacacccgctccccacaattcccccttttttcttttttggcagagagaatgtctgtagaaaggccccccgcagccatgccccttacccgtccttgggtgacaaacagcattggtttgatccctgtcttaggttggtgacatgcccagggagtcttatcactgactacctctcaatcatgccaagccacacctggggagattgtgttttgcttgcggcaggtgcatcaaaaggccaggatgttaattaacctatggccagatcttaattgctgcaagcaagcctcatgggtgaaggtagaggtctgatccccagtgtgcaagcataggggccctacacaaaaccatcccttaggctcatcacccagagaggtcttggccagctcctgtgtcgtttttcctgggggaagggaactaggacactgaaccttcatgcaatcagacgtgccttccacaggatgccaacagcaagctatcctctgtgcagtgcttagcctcgcaccccacggcataacgcagcataatttcttttagagcggcaaaccgaatctgaggagattgtcccgcctccactgcagcaaaagcctacgctaccatggcgaaagttcgggccgcacactctgcacctaacacatgtgccaaacacaaaacacacacacactataacaagcatacatcccagggctctcatccccgctcatcttccctgaagcaagggatagatggccagcggggctatctctttaaggggaatttagggatcaaaaagcgtggaaaaattttgaatgtcatgtcgagctggtatcggcttctggaataccgaaaggatctctatctcggctccatcctttgtgcttgtgggatcatccaccacatccacaggggcaactggatcaggagcctcattcttgtagcgtctcaccaatctctccggcacccaaagaggttctgtctggtcctgtggaaacacaaacagaccttctcgcccaagtcaacaccagatctggtcgatccccaggggagatagacacaatacctcgtggtaatgagaccataacctcaatcacctgtgtgtccatctggggagtcaatacgagagtcaagttttcactgctgaggaggcatagggaggaggcacagaagctaattcgccttcctcctccgcctcggnnnnnnnnnnnnnnnnnnnngcagggattctaactttatctagccgacccatttttatctaagactcgcttaatttcctttctatattcagtatttccaggtggtgtgctatttcttgaaccactttgaaaactgtgaactaccttgagtaaaattaagaattgcaaacttagattcaggtttctgttgagaggcttctgcacggtgtgatatttgtgtattcatcttgaagcctgagattttctcaagtagcacatggacttggtaacggagtctacgtttcaaatgaagaccttgaccatgccttagaacactgtctagacctcagctgtctcaatgatttggaagaagaaaaatactagtgctgaactcacaagtctgaaatgttaaatgagaggttgaacctagccagcatctttccctgagtctggtgagctcaggacaaatggagtcctcccgtgtcctttggttctctctctagaatgacaaggctcaccttctgccctggttttccattcaactctctggaggaagtcccttatttgatgagcatgtcgacaatgttctctctggaagttgctagaaacacacccacatgctaattcatgaagaacacttcctgattagtggctctaagtaggagcagagagaactggtggggttacaggcttcccacctgggagacagacttctcatccttaagtgaataggtgactgattagggtagacttgcccacatgcacttagcaccttcctcagcatcctccgaagctggagggaagaacttcctggaaaagtcatttcttagagttgagctttccaaaagtccccattgcagtcttcaatgagtggctttccctggactaaaggctatctctgctgagtacttaggaaagaatctttcctttcttcagagagacaatgagtgacatctgccaactaactacaggtctttcagaccctgccctacttgttccttggtttcaagtggatactttctatcttaagaatgtagtaggatctctgttttatttgggcgctggggagaggtgctgacgtaacttttaggaatagaggtttatgagaggaagataataacaatatccatctccagaagcttaatgccagccatgaagcaaaggactgaggaaatatgtaaaaggagtgtccacccagggttccttctgttttgaagtaaaccagactcttccttagttaccctgaatacctgctttcaagggaattcccatcactgtggccacccaagtgtcttctcaggacagataactgttaacaataactagtgccttcgtttacgagtagctagggcagatgaagataaacttagtgattctggagtggataagcacactgaagggagtgttgtacagatatgtaggggaggagaatcctaagtaaattcctgaggaataatagaggcaaaagccagaaggctaaccctgtcagggaagggcaaacacacctctgaaaagaatcgtggtggaggggacagcttgtgcatcagcctgacaaaaccttttaacagagaggtgggtggctacttcccaggaacattcattcaaaactaatcccaggcgtgaggctgaaatggtggccacacccacaaagggggccggaagttactctgtaagaaatagtgcacttttttttttatcagaaaatcgaatacattattatagtttatgtctttgaaagataacccaattttggaaataaacttttgatgaagaaaggaaagcaggacaactatacctgattggttctgtaaaggtagccaggacgtttggatacaaactaggatgaaaatgtaagaatgatttctaactcaactcttaatccagtgtttgtgcgaaatagcactgctttctttaagttttcaatctgctttcctccaaatcacatcggttttccttttcaaacacatttttaatatcaaatattattcaactgagtgcttagtatatatcctgcggcatgctaaagttgtctgtgtttcctaatcctcatgaaagtctattttatctccacttcatagctgaggcagcagagatggagagaaagttaaacagtttttgagataaccaaccagtgagcaggagagtttgacattagacccagacagcctgactccgcgtcttctttcttacctgatccttcagacattttctaattgctaagcattatctcaaagaacagatgttttatgtcaaagaaaactcatttgtaatgtgtggcaaaggatcagttggccatcctaatgtgccattcctcttagcatgtgcagggggatgtcatccaaaaaaggaaatacagagctctgaaggaagtttggtttctgagttttttccattacttatttgaggggtggtattatcattaaaacttctttgagctcttgcccccttgctccccattcccttcttcctctctccatgtggccatggccagcccctacttctctactttctccttctctctgccttggtctgcctctgctaccctcttaagtcctctccccatgccctaaataaactctattctatactaaaaaaataaaaaacaaaaaaaaacttctttgaacagttttggtttggttttttttttttttttttttttttttttcgaaacagggtttctttgtgtagccctggctgtcctggaactcactttgtaaaccaggctggcctcaaactcaaaaatctgcctgcctctgcctctgcctctgcctctgcctctgcctctgcctctgcctctgcctctgcctctgcctctgcctctgcctctgcctctgcctctgcctctgcctctgcctctgcctctgcctctgcagtgctgggattaaaggattaaaaccctgttttaataaaaaccacaaattttctcacagtgctcaaaaagaagggctccattattgattgttacctgtaacctaaacacaaatatatatataatatattctacctaatatatgttatatttggggattggtatcaggaattaagaatcacttgattaaacagagaagaccactggggctccagaatgggtgaagttacagtttgatcagaatgcgtgtatttaaacaagagcaaagatgggtaacatatcttaaaataccaagtattggtcaagacaaagatgtttcatcctcaaagtcaatcagataattggtagggaactagtgaaagctgactggatctatctgtaaaataaaagacctgtgctctgccagagatagctatccagaaagaatttaagtggagatcccaagtctactcctaaggtccagcctcggcttagagagaggttctgaaggaggggtgtctaggagcagggaaaagaacaacttgaagtcaaatcatggctccaatctgatgacctgtgttctgtttgacagagtctttccagcctgcttctctctgtgttctgttttctctctagagacttctctgtctatattcttctggtttgctattctaagatatctctctatccctgtccttcttgcttgtatgtgtggcagttctccaagccattctttccttatcctaaaaagttctctatataacttatctcctgcagaacacaggcccagccttttattttacataccaatcagtcatttactcctgggggggaaaaaggaaaaaatttttccttttgattatcttataaatcagtattctttgacccctagccctttgattctctggagatagcaagcatacatttttcttaacattgcaaaagaattcagagatctgtctgcatttgctttaagcacagaccctgaaattaccacttctaccacacctgggcctaaccttgtagtctcccaggctgaccttgaactcaggaatctgcctgcctttggatctgcctgtctttgtatctttctgacaagccagctcacaacttagctacctctgttcctttatatcactcataattcatattacatccttatatttttgcatagttgagaaattatgtatttttctaacatgtttttagggttctttccatagccttaagggctgtcccgaaggatgcagcatttaccatttcgctgagatattagccatacctttgcctcctggactcatgctgtctaagattatcatggagttatcaatagggaggatattcctcaaaggaatgtaaaatatgtacattcttatacaaacaagccttactcccacagcagccatcaacacacaccacacaccacacaccacacaccagaccagggccctgtttcacagccataccaggctcagcagtctaccactagaacttagggcttattattcccttcagaatacttattagtgaagttcgtagaaacagaaagtaggggtgacagttgccagggcctacgaggagaggccctagaaactattgtttagtgagcacaagtattcaattagcgaagggatttctgcagctagatagtgaagttggctacataatgtacacagaataagttaaactgtaaatagttaaaaaaaaatttagtattcagaagcttgaaagatggcacttgttaagagcacttgttattcttcccgaggataactcttcagtttctcttcccagggatccatcttcagttcctagcaccccacatcaggcagctcacagccatctgtgactctagctcccaggcgatcccacacctgtgacctccacccacaccagcactctcctgcacgaacccacgtgcaaatgcatacaccacatggaggacttaaagataatgagagtaaagtcttttaaaagcttgccgttgcaagatactggggatcaagctatggttgtatgataaagaggagtgtaacggataggagctcccgcagacaagcgatgacttccttttaaagggaagcttgtgggtttctaactttttacagtgcaaaatagattgtgctctctaattttgccctaaaaaaaggtaatcaaaataataatcattgtccccagtggaaaaacaaaagaaaacaaaacaacagcgacaaaaggactgtttgtatttgagaaagttggcagatgtcggtaatcctggtcaaaatatatatatctgtgcatggaaaaatggccaatgacataaccaaataaagggggaccataatgcagaaggctgagctgctcccaatgctgcaaatgagtcttggaagatctctctctctctctctctctctctctctctcctctaaaaataggggacacatgagtgtgggtagactatccatttacctatagccgttctcagcatggtgatttatatcacttcccatttcagagacgatgggttcaagaatactaggccaaggaagcaaggtagtcatgcaaacaggaggaaaaatggttgtcctcagatacatcactggtaccttcagatccatctcctcccacaccagaaacatttataagcaagtgtagatccttctctggaaaaataggacaatgccaaaataggcacatacattcagagagagagtggggaaggtagggtagggtagggtagggtagggtagggtaggagaggataggataggagaggagaggagaggagaggagagaagagaagagaagagaagagaagagaagagaaagagaagagaagagaagagaagagatgagatgaaactattattcttgtgtcttccttacagggatatgatgagccattaggactgtatgccacctaaaacctaaccatgtgaagtataatacactgagcatcgaggagaggatagcaggaagtctaaaagtagcctccaaaatatagtaccctgcacttcctaagatcttgataattcaggaatctcttgtcaataggaaagcattgcatccagatgtatgtacagtgaatgtaataagattaaaaagagacactaggacgcaactcaaaatccccctctacaaaggagaatggcacgacacttctcagtaacaaggaaatgttgcaagagttcaaagggacgtgttcattaaggttcagacactgtgtagaataccagaaaactgtaaaaacggatgtccatagtcatttttcctaaagagttgacttggcacatctgtcgttcagtacgtaaggcaggcctgaatatttagttcatagtatggctctgagagcatctgtgcttgacagtttggaaagtagacagtatctattataatctgaaagtagaagtttactgaaagggcagaagactagattataggcagggtactgtaaagtaagattatctgagaaaaactacattatgtgttaaagatcactcctaatgccttactcaactggtgtcagttaatgtctcatatttaattcatgttatggataaatgtcagctccactagttacacttattcttgaatgataggagaggggaaccatatctgcagatacagccaatccactggaatgcagacaacatcccttgagagctgttgcagtgcattgtgggtcctaaaggttgtgtgagataggtgttaggtaatttaacggcaatatcctgctattaatactcaattgtacttcagagaaaacataaccagcatatcaaaccatttttagaatagatataaaagtgctttataaatttagcttactttctgaagatgagactgaggaaggatacaaatatcaaggagctaataaaggtccattgctaatatggaggaactaggtagtgttctaacgaatgaaattgtggtggttgcattcaacaaaatatagacaagataaggagacctattaatttttccccgcccatagcaatccatcaaagggcagtgactaacaattcgaagtcaggctatgaatactatgcaaccaagtagatcagggaaactgaggcagtgccaacttctcatccactttgcctcctcctcactctgtagacaaaggtgtgtgcctcagaagacccagttctccatggccaggcacccttgccaacctggacttatcacattcgtgtaaagcagggaggctgtatccccttgattcaaagaagatgctcagctgtctaaactgtgcttttgaaattttcatgagactaaaaagtaatataccttaggatagggatggcatttaacaaaaagggggccactccattttaagtcagtcactatcttttagtgttagaggtagaaccaaaatttacagacttaaatcacagtagcctgagggtagatgggccattcctcctctgtactgacaacctccacgtgccattccactgtgccacgccccccccccccccccccagctggttagttgctccctgttttcagatttcccagctcagtacttgtttctgggtgagcggggaagccgtgcagtagcccctatgagactggaactcagcgttagtagaggccccctggcagctgggtggcggggccttctgagaacggtttttggatggtagggtaattgtaggtgagtaagttacttggctcctgctgtgtgtgtgacaaagaagggtgtggcagtaaagtaagttatctcactgagacagtatcctctctgcggatagaggaccgcaggggtgattactcctggagagcttagtactccgcacgcagaccctgaactttctggtcagcattatctttctacgggacaaccaggagatgtttggtaaacctggaaacaaggaagatgtttggtaaacctggaaacaaggaaaagggttctacacagaactgcttaatcttatttaggttggagttttccctcctttgaatcacttttaagttcacaaaataaataagggtaaaccatccataaacaccctactcccccattacacacacacacacacacacacacacagtgcacgccagtagtgtcttccctgccttctttggaatttatagaaatatgtgtttaacagtatgaactaaccagtaccccggagctcttgactctagctgcatatgtatcaaaagatggcctagtcggccatcactggaaagagaggcccattggacacacaaactttatatgccccagtacaggggaacgccagggccaaaaaatgggaatgggtgggtagggaagtgggcgggagggtatgggggacttttgggatagcattggaaacgtaattgaggaaaatacgtaataaataaaaaaaaaagaaaagaaatatgtgtttagggaacctgcatgaaatatactaatgtatgagcaatattctaaagacggtcaggtctaagaaggcctgactgtccctgggcagtacaggaaaagtgggaggcttatggagagaagctgtcaggaagcaatttgttgacatttactttatgaagtctgagaatccccagagaagacaaaatcgccagtggccactgaggtgcgaacagcctgttattgtcatcagaggccccagtctccgccgacttcattccttctacatcagttttccaagctgtttgggtgggtcacagccacaatccagcatcctgtctccaaatgctaaataaataccaagttcacgtcagactggcgaagcaatgcttggctaatgtcattgaagattccgaatgcttagttacgcttgataattcaccttcaacataattgaagtcggcacacccagaggaacatatatcctttgtgtaaatgttcagacggataggagagaaggcgtggaaatgttacttctgtcaggagcaactgggaccagcttacagagaagctaccataaagaagagtatttttttcttacgtacttaaaaattctaattaaaatataattacatcaccccttccctttcctttttccaatctgtatgtcacctcttattacctctcaaattctttttcttagatttttttttacatatttataagtacaaacatatataaatgctacctactgcatttgtttagtgtaatatgtatattatatatatatatagtacgcacgtgcgtgcgcgcgcgcacacacacacacacacacacacacacacacacacacacatacacatacacatgacgtcacggataaccacttggtattgtaccactaattacttcagatgctacccgtggggcaagaacaggtcttgaaaatagtaaagattaggaatgacacaaagtccctttctgaagcgctgttaaaagccaagtgacctaagtctccatacacaaatcaatgacatttatgtgtcattaaaaaaaaaaattagggtcctaaaacagcaagaaggcagctgtagtgcatgtagcctcttgcccaacaagttacattcgatttcttagcttaaataccccagctgcacctcattcaaggaggcctgctaccttgatgctttgtggaatttccaagggccaattcacatatcggcacaaataaagcatggcttggtttttttttttttttttttgtttgttttgtttttttgttttcttttttctgtataatggaaatgactttctgctgagtcttcaagtccccttagcttctctgttcacgttgccacgtggtagcaggagaaaagtgattttgaggtagtttctttgacttttgatagagaagaaaagttcaatggctaggggtgtgtgccttaaaaaggtgctcagggagggggtcctttctgaataacacagacagctgcttttccagaggagggcatggccttgaaaatctccagagctctgctgtctgcgtggctgctttgctgtcctgcattctgcattcagagttccgcccctttgctttgtaagtcagcaattgaccaggccgggttgggcgctttttttttttttttttttttttcctccctttctcacttccctgcgatgttttgaactgccttctcacagacgtcattcagcccttgaggaatagtttctgcctggtgagactggatggtaattctcattcacaaagactcgcagccgcgttctcaggggacacagcggatattggcttggcaggtacctcgggccacccagcccacggagctgtgctcctccagcggactcctttgcgctgcagagagctttgtccctgcggttgatcgccctgaaatgaaacttccttgacagctcgccctctgcgtgtcaccaggctgccaggcactttccttttgctctacctgagtgagtgcccaggggaacaaacctctaagtccgttgttatggaattgcagaaaagagattgagtgaccggttcgctgggctggcttcccttgtgacccagatgaagaagagattcaaaattcagttcctctgtgggcaaggcaggcagagaaggaactcccttcggaagagcccgggcttgggcatgaaagaggaaagcccgcctgctgccggcgacactgagagctgaggcaggaggcagccttcccagcccgtggcgaaacctccaaaccttctttgtggagagcccgctgatgaatattgatcagaagacttgaacatttccctttccctttttcattttgtgtctcccctcttcaaaatgagcattataatgaagccaagatccaggtctacaagttccctgaggacaacggaggcagtttggtaaagtgctactttctccttcttcccctttaagactgacatagaactcaagtgcttagtaattgctgatgaggtgtgatgtgaaagctttcagggaaaacttattactggcagcccccttacattcctgattttcctccttaacctgtctgttctatccagtgtgtgtgtgtgtgtgtgtgtgtgtgtgtgtgtgtgtgtgtgtgtgtgtaactccttatgggccatagtcatttatctaagagtcacttttaagggagagaagaaagcagtggggttttgttttgtttttgttttttgtttttaatgaaagcttgctagttctcactgtctgatttggtggcctattttctccctcctttttgagaactggaaaggttgccttggctgctgccaagggttaggagttaatgatgctagagatcttttatgacttatagaaaaagcacctggaagataaaaccacgaggctaaacacgagcatatcaaattctttctcagccaagcacctcctcttcactttgttagtaatatgttgtaggtaatataaaagttttactttagtgaaatgtgagtccacttcaactgaatctaatatacattctatttttccctaatcctaatttgatatgctcatatacatctggtcgttagagaaaacttcccaataaaattagtttgggctctagaatagctatttatagaattctctatggctaattctgagggaaatcctttccgttaacagttgtaagtgaacaaatcagctcacttcttggatgtggaaaaaaaaatcatgctcgggaaagggaaataaaagcaaagactgaggtagcatcaggcaggcagtgaaactcaggatgtattatgtaagcaaacaaactcacatggaaatacatgagttatctgcataggatgcccagcgctggctgactgctgcttttcataccagcacttcatagtagcctggaaataaaaatgcagccctccattgtatttctgtgaattttaagaaattccagaaaaagaatctccttcttatgatgttgaccattcctttttaaagactacattagatagctttatgagttgattgtgaaagaaaactttgtatctgcagatatgtttgtttgcaaggtccttttttttccccctattccccaacaaaaaaattactgggaacacataaaattcttttataaatttatgtagctaatgtaaacctctgacacggcagtcagattatacatgggtttcacacatttatgatttatatcaccaataagtggaaaaaaagatctcagttaaataaatagcctgaagatttatttttaactccagggctcaagtgacaataatttatttatttcagctggctgtagttagtaacacagacaagccttgtgcttaagtcattgtcacagactgttctattatgttaagctatctgagatagtcaacaagtagagccacaattcgaaagactcattaaaatactgatttgctggggagtccccttaaccttaaaacaaaagagaaaatctacatggtgttgctgttaaagtgatctttgtataataactgaatgtcactgtaacgtttctgatctctagagagaactgtgaactacggaagcatctctggttaagcttacatgtgactgaagaccattgattaactgcttgattgagtacatccctgtatgcttcaaataattagaactgtgagcgttatgggactagaaacagttcttccttttatgcttatttttaaacatcctacacacatacacacatatacacacacacacactcacacactcgcacacatatttaatgtatacatccactacctcaaagttgacatctctgtacctctccaccagcaatgggaagctcagcttgataatgtggccattctatctccttagccatcttgttcttttataattgagtttacatgaaagaaacctgttaacttaccttttattttccttcattccaagaatgtatatttatttgttaatatgtttgtttgtttgttgagaagctcatcttttgacttcaccatctttctttgcttaggtaaatctattttctgtttcagtggcccactttctccaaatctgccgaccttctccaggaatgtcccaaacccaaaccctatctttagaaggtttttatctgtcttaagcaagtatccagagcttcagatgacttcctgttgctcttttcctatctgttgcccccaccatatgtattgtaccaagacatctactttcacttgctggctatagccttaatcggacccatggcacagtcatgagtgattacataacaaattcacaatatttcactctccttatgccttacacaatcttaattttaattaaaacctcataaattaaaaaatgaaattattctatttgtgttcttgtaatatatgtcagattttaaggataaggattgcgtatttagtctgcggctgttcctcaaatactgactacatattatgttccagcagaaagaggctttgacacagattctcacacgttcttttaacacttacaacatgagttgaaaaacttcaatgtatactttgctgttcttttaaatttttcttttttttttaaagatttatttattatatgtaagtacactgtcactgtcttcagacacaccaagagagggcatcagatcccaatacagatggttgggatccaccatgtggttgctgggaattgaactcaggacctctggaagagaaaccggtgctctttaccactgagccatctctctccagccctgttctcatgaatttagtaaaaatagtaagtttgctgctgaggctttgtctgtatttctatttctgttgcttcagtatcgatatttagtcttcaaattctatgtaataaaacacgacatttactgttttaaagattaactttatgtacattgatgttttgcctgtatttatgtctgcctgaggggtgccatgcaccctgaaactgactagagttacagatggttgtaagctacccactgtgggtagtgggaattgaacccaggtcctctagaagagcagccagtgctcttaactgctgagtcatctctccagcttcccctccgaacatggcatttcatttccattaatatttgaactttacgcgtctcaaatgttgatttacttcatagctacatatcagtgatatgattttattagtttaattaaaatgtgtgatttaatttaagtaaaggaaccaagctatttgttggccttcaaaacataagtgaccacttgtaaataaaactgcctttgttcctccccagctgtcagagctcaccatgtctgcagtcccttgttattcttaagatccttgtgtgatctagtgacagagctggagcccttaaacacgactgcagctgtcatgaagcaaactttaagcttattgttgaacatataaactctacttataggcaggaagggcctggaagctctcttccaacattttgatgctgggtattttacagagtgaaaaataaaaggaatggaaattgggaggttgcaggcttttcacagtaattctgcattgcatgttctcttcttcatgacgaaaatgtcgccgggcttggtggcccacgcctttaatcccagcacttgggaggcagaggcagaggcaggcggatttctgagtttgaggtcagcctggtctacaaagtgagttccaggacagccaggactacacagagaaaccctgtctcgaaaaaccaaaaaaaaaaaaaaaaaaaaaccaaaagaaaaaagaaaaaagaaaaaagaaaaaaagaaagaaaagaaaagaaaaaaagaaaagtgtcactcgtgaaactttcattaaaaatctgattttgcatttaaacaagctaagctttacacacacacacacacacacccttacatccttatatataattatatatgaacaatttccccagggtccaaaatttttaagcatcccaataaaaagctgataacattttcagaattacgttgcaactcagaccaataaatggttacactttgttatttggttttttaattagctctcttctcctaaggtcataaaatttcaggctggttgagcattgatgttttagctttaagaccatggttaaaaaaaaaagcatttgattagactagcatgactagtctatgagtattataaaagaaagagagagagatgtaatccctgattaatatgtggtggaataattacttataatccccccagctcatcctcacctgtccttgtttcaatttaacttacataatgtacatagttgctcacaccactactgtcctcttcttagaaactaaacagataattattgttgcgttcctctaataacactaataatgctgcttgtagctctcatcttacggagggccttttgtgaatgagaacatggaagaattgaatgtacgacacatcataagccactggaaggagggagttagtatatctacattctccagatgagaaaatgatgtgggcaaggccctggaactggcagctgccagagaaggctgggaacagaacccgagtgtgcccatttgaaagataatgttctttctcacttcagcaagtcgcccccctctaatgtctttttaattagcatttgtgtgtgtgtgtgtgtgtgtgtgtgactacaaaattggccatctgatgagtacagctaaatgtaccacaagctgtagaagttatcatcttagaagcatgagagctgatgtagtttggggctaggtgttgaatactgtctgtttgaaagatctttgtacttccttcattaagcccattatattctgcactgctatgagtcaggccacctgtgtcctcctaccaaggagaatatggagccacagaccatccttctaattgtattagaaagtttaattctcttctatgcaagctcttctaaggtagaaacacaaaaggaaaatgtctaagactttgcatgaagtttcaaactgttaaatattcaccattgagaagtatataagctccctgcctgtgttgtcttttatcttagaaactttgtgaatggaataatatatggaatttgcatacttactacatttccaacatacaaatggttttgcctgagtggtgactgactgtcaaagtgctttataggccacagggtgcatgtgtttaatctaattatttatgttaaaatattatctgtattgcagcagacatgtatatgtactgcttttagaagtgattgggacaccttgcatgttatttaaaacataacaagaggagcacaaaacacattgcaaaggcatttgcctttttaatgtcataaatttagagagtcaaataagccatttttcattctggttctaacatgaactgttgggctaagaccaatggaaaacacaggtctttatattaccagtcctaacagcagcaaaattacagttatgacgtagcaacaaaataattttatggttgggaggcaccacaacatgaagaactgtattaaagggtcacagcattagggaggttaagagctgctggcttagagtcatagacacggctcaaaaagaaaccacagaataactaagggtgatcatagtttaatatctatgttatttcatgcttctatttggaattttgtgctagacttgtcaggaaagagcctatcgttcctcattaacactgtgtgtgatggacagatcaggagtgatcctgatgactggcaaggaagtgctgagttagatagaactaagtacttccaaagagagtgctgtctttagtctggcttctgcatctcagcatgtcctgtgctctttccaacttctactgatgaatcaagttcccggtaaatagcaccatgtgcagtgctttccccagggacatgcagaaacgaggcagatcttttcttgtgtgtagtagcacctagacctaattcgaactcccttcttccccatcgcgctgtgggagtgatggtttggcccctatgactaaaaaattgcctttatcagaggtaaagaaagcccacacagtcgtccctctggcaggtactccaatcatagcatgggatttattgcaaaagaaggtgttggggccgtatgtcatcataaaattaggtgctcacaattggtgcgtgtaagattaagccaaaggagagggtgaagctgaaagagaaggattttatggggctttctgcagttttcatgtatctcctggactgattgatgcctgggagactcacagagatcctctgcaaaacagtaatgctgagcatatgaaggccctagagccggcataaaacaagaacagtggtggcccagctatactccaatgagctggaaaggaagcagagtctaccaaaagccaacctaagagctgtacttgtctgtgatctcaggattcaggaggtagaggcaggaggataggaagttttgaagtctgacagactggactaagtagtaagaccttgccgaagaaagagggagagggagaggaagaggagaggaggaaaggagggagggaaaagagagagggaagaaaaggtcatgctacatgttcgattatacataggggttgaagatgactcttcagctaaagttctatctctcgtcttgtgaagtagcttagcaactaagtgtgttagctgccaagcctggtgacttgagttcaacacccaatgatgagaagagacagacttgttctctgacctccatatgcatactatagcgttcacaatcacacacaccctaaataaacaaatgtaaacgaaaaaataatctctctcttcagggataagggattctgggaaggactgagacctcatgtgaccacaaaagataaggatctatgatgaacagcagttaaatgttaataactgaggcagtgcctgagatatgcctctggtgtccaagtaagtgcctctctgtgcagtctggtttggcatgaactaggaagtgttccgaaagaataaagattagggagaactgctggacttgtgggtacaatttcttagcacagcaggggaaacataaattctaagtagtttatagtgattggtctcctaggagcatcgaggctaccgggggaggctgtgaatgtgagaaggaacccagaggttaagctgttctttagaataaaaaagtaccaaaatacaaggggaagatgtcagtggaagagctgggaaaggatgaccaaagattaggaagcgttccagagaggccccatctagatcagaaaccgccttctaccctcctggcagcctattctgtttaatcacactgctgacacgggagtgcttgcgttagaagtcacaacacacacacacacacacacacacacacacagacacacacacagacacagacacacacagacacagacacacacagacacagacacacacagtaaaagtcatcgtgtgtctctattccacttgagagaatacaagaaattagaagacaggtggaacatacacacacacatcatacacagacacatacacacagacaaacagacagacagacagacagacacacacacacagagtaaaagtcatcctgtgtctctattccacttgagagagtacaagaaattagaagacaggtggaacacacacacacacacacacacacacacacacacacacgggtggtgtgcgctcacacacactcctgatggtttagtttggttggttgtcaagttgctttgttgacttttcttttcttagataagatctcactgtgtaatttaggctgtccttgaattgttatatagcccagtctggcctcaaaatcacatcctttttcctcattcttcttccactcttgtatcctagtcctggtgtttttaacccacaagactagaaacctttgtttatacctaattctagtctcctagtttaaatattaacccatcacccctggttatcagtgggtatgaaaacagataagtaacgtctctttgctggcatttgaaagttggtgttcctagcctcttttcattctgtagtttaaaatattccttccaaactgtaaatgacaccaatgtgactcattaaatgtctcattagatgtagtttctgtacatgattgttttcagacctcctagataagactgcccccattgtacctaatttttcctccagtttaaaatatatcgccgatgagtcattcagctctgtgtaattaatttatgagaaacattcatgcatatgtagaatccagaagattataatttcaagtatccatgatgtcaccccactacaatgtggcacaggacttattcttctgtgtcaaggaattaacataataccattttacttagaataattcactgtaaaatctgtcatcttgcagccagtggtattcttacatgtcataagcctctactgctgtgactgtttttgtttttttttttgttttttttgtttttttgtttttttttctgctgctgctgcaactttgtctccaaatgtaagggacctgatctatggctgcatcaccagccagctagggacagtggtccctaaatccactagagcagttgaataggaccaaataaggatgatagccacagtagactgaacatccgctcagttggctcagccggcttgtcaggcattggacttggtctcatcacagcaaccatactgggtacaattgaagctgcagagctagaaaaatcacgcagctacaggaaaaccctggtctgtctacagctaacctttccccgtggctttggctattggatgtgatggtctgttttccctcactatctacacttcagttatatctggttttccttggagatattaacaaaaagtggccagcaacatgttacttagccttctttttcggtcctccacagttcaagcatatgaaaacatgtttcccttttctgcttatttaatagtcttcctccccacccccgcaaattttgcatccagtccttcaaccgtggaccctagagatgtgtaagaaataaagagtggactttgatatagctccatcgcttagagagctagctagttcctcctgagtcactcagctcattgaccctcctgctctggtcagactataaattgcactgttttcttcctttctggcactgggccaatttggagaaccataaactctttttaaataaatgggaccacagaacagaacctataatctatttctccacacccctagtttcggctagccgctgtcaacgttttgttagtctttaacatttctggtcaagtaagatcaagaatagctgttggaaccaatagcaaggcttacatagtaaatgaatttgttggataaaagcatttaaactctaaaacgtgcttttgaagtgaaataggcatttgagaactagtctacttcagcacataaatgtatgaagctgattgtaactctgatttgtaatggaccttgatgtcatttcagacacatctagtataacttaagtttttaaattacatttacactctctctctctctctctctctctctctctctctctctctccctctctctctctctctgtgtgtgtgtgtgtgtgtgtgtgtgtgttcatatgttgtgtcacatgtgtagaaatcagaggacaactcaaaggagtttgttctcaccttccatcatgtagttcccagggattgaacttaggtcacctttacaacaagaacttttatacgctgaaccaacagactcactctcatagcttcctaaaactgggagctctagagaacaaggcctccagaatcttctaaaaagaatggggtctcatttcaccccactacagtaactacactctggtcattacattttttttcaaatcatacagttaaataaatacctgtaatttgtgtcttaaattgtaaattcatttttcttctcctaatctactttctttccattgttgttgtttcttgattgtttttagtttgaggtagggcatcactatgtagccctgactggcctgaaactcattatgcctagaactctcagagaccaatcctcttctgcttcccaagtgctgaaattaaaggtatgtgccaatattcctggattcctaatatactctagtcagaaaccaatgtggccacttgctttggctgagtgctcattgtgtgccaacgctcttcagtgtttgtaagaatgaccctatgggcatccttttggcagatctgatgacatctcttcagtttactcctcccgttacagaagaggaagccagggcctgctaaggtcacccaggcaaacttgtgtggcacaaaaaaggatcctgtgcatcacacactttcctaaatatttaaacgagctctttactgttctttgtatttctttagcagttttatccatttatataataacttttagccattttcaccttctaatcaatcccctctcatccacctccctctctttcagaaatctttctccttagcaagtccccttcttgcttttgcatcttgcccgcctaaggccctgagtttagagttcctagcctgaatgtgggtgggaggttatttgctggtacaaaggcaacttttcagtagtcccaagactgaaggacatgacaactcttccttcaacatctgcttcctaagattctacaacattgcctctaacaacaatctaggcgttatcacattaaatagctcatgcctacagtgttcagcacaagtccagcttcctagaagtttccaggaaattctttccaaacttaagaattttaaaaagtaagtggtatcaaagtaaaaaaagaacctaaattgtgacctttaaagtaaagaagaactatacatttgaaaactgatttagttcatgaaggttccttttccctaagatagtcacgcatttccacagagtaaactaatctggataagtcatattcaacaatgagattccaagaaggcattcctctgcatagggaggccggtgaagtgtatatggcaagtaagaaatggtcagttagaagcccaagcacccgtgtcttggttataaattcgttagaatcctcaggggaagaagccccaagtgggtgttttaagctaacgaggatggctcagaggtctgggcattgtcctttggtgtttctatggaagactttccttctgtggttgtgtgatggctgagttcttccataatgacattgccaggataccctagcttatctaaactatcttctcctatacttctaaacagtgttctgggttgtgtagtttgcagctctgtaagtcagttacacacagatgtaccattcaaaaaaatctactaagcacagatgtttttttttaatattttatttatttattatatgtaagtacactcagacactccagaagagggcatcagattttgttacggatggttgtgagccaccatgtggttgctgggatttgaactcaggacctttggaagagcagtcggcgctcttaaccgctgagccatctcaccagcccagcacagatgttttacaggccattcacaaatcattgttcacagggccacagctgagtctaccacgttgcagtctgggcaggatttctctttagtttgcccttttctttaagtccagcagaaagggcttaagtacccccccccccccacctctgaaaatatgagatctacttaggtctgtcctaaagtctggagtttcagttcaggatgagctctgtagccatcaagagtacagatggtaaaaatgcaataaatacccaaagcaagcaattaacactatatagccttcaatatctacttattatgagtaattactaaaagtgtacaactattactatatcatgattaacaagtgtactgtgtgttgggctaggaattctaactgaggatggagctggtgaccgccagagaaaaagggatcatgggaaataccttcttaaagccaagatgattaacttcgatcatgttcaggtgacttttcctacttagtggtttggttcgatgtactgagaactgcactgggcgcaaagaacaaatattgctcatcggttggtgatatccacttgagaaaagggtgccatgtggctgcttgtcatttaaatgccctgctatgtacaaactcttaaatatacatgcaaatgacattgctctagtggaaacatcttcagcatcacatatatgtggtttgtgacactgttttgattatctgtctgtcacccatccagggtctatgttaaaatatatatataaattctttctggacattgaaaatcaaagaaaaaaattctggtaattttaattaacaaaagtcccatctgtaatcctgactcaggttaaaagtgaccctaatagaaactagaaattgctgttccccactttgagccacagtctacttcttattagaggtgacactcattatgacttcaaaaacggcaaattacagttctctgcctatgattaccatacaaaaggaataatgcaatatgcaatatcatgtttgcccaccccagccccttgcagagtgatgtttggatggtgatcccatggagatatgtgtacagttcactcctccttgttgatgtgtagttaagttagccaactcttacttagtgctagtgaccttcctggctgacatctatacagtttccagggtctggaaggcagctagtggggaaacagcattggcaatcagggtcatgctgatagcagatgaggcccaattgtggtaactgggctatttataggatcaatactactgacagaacaaaatttaattatctggggctagcaagaatgcccagcaagaaactctgagctcttttaacacttaagtgcacatacatatagacagacaaacagacagatatacatttggatggatggatggatggatggatggatggatggatggatggatagatggatggagtagagcttcaccaagccatcccatcctctgtaattcttttctctggccttttttagacaaaagttcttagaaaattacctcatagatgaaatgttacataaaatgggagttacaaaaggatattgatattatgctcaaagcagtacttcattgtctaagctcattataagttcaaagcaacagttttcacatggccttgccttatcataatgcacacctgtggcttcatccttggacctggatgcttttccttgaacccaaatttgcccaagcctatatgttgttttagtgtaatgtaaaagctcattgtaattcttattacgcagcctttatttactattgagaggagtgggcacactctattcttgattctaattttcttacgtctttctagcaaatgactaaaaccatctcttaaaactttcttcttaagattatttgaatcaaatcaggaactctataaaagtattagttcatctaaacagcattaattcatgaaagttcatctttatgtcgtgaagaaaatctgctcaatagggtgggctaatgcccaggaattcatagcctacgtaatagtaataggaaaaagcatatcaggtgtaagaagcaatcctgagaggcaaagtctcttggggaccttgcctctcagaggtcacacatcttacttagtccatgcaaaaaggtgggccacctccagaaaggtcacctgctggccttagcctttcctagatggcttctgacaacttagtatggaaatctaagtattatttgcgagcactatttgcaaaactaaagcccaatgtaagacatagggataggataatttgaaactgttattaccagactagcctgcagctaaataataaagcagaatttgctatgtgcatgacccaaggctccatccctagagtcaaaactgatttttttaaatgaagtgcagggggttggagagatggctcagcagttgagagcactgactgttcttccagtggtcctgagttcaattcccagcaaccacattgtgggtcacaaccatctgtaatgggaatctgatgccctcttctggtgtgtctgaagacagcacccgtgcactcaaatgcatgaataaataaataaatctttaaaatgaagtgcaaattaaacacttgagttcacatgtatagaactattataagatcacagggccagttaaatggtaactacactcactgtgtaactatttgtataaacctttctgcacatactttgctgcgtatttttactcccagcagacatttcttccgggcagtcttagtggaaggaaacctaattcagaatgaaagatgccttgcctgtgctcttgtggaaccttaagtattgtttcctataatttttgaaatattgcagtgtgagggcagcttcaaactcacagagatccacctgcccctgctccctgagtgctaggatttttaagagtgtgcaccaccactgcctggcagaagtattgcaatttctagctgctgttcttcttgccactcaggtgagagtgttacgggtgaactgggtttgcccatctttgctcagtgatagccctatattcctagcaccaggcttgcttcctcctaaagctgtcagtagacagacagcctactgtccctacagaacagctaattgctctctaacaaataaccgaaagaattataagtaatctgctgctacttataatttttaaccaggtagcactgtgctagagagtgtactaaacaggtcacaaaaacagaattttctccttatgattcagagttataatgtcttttgggtttttggtttgcttgattcgcatgtttttttcatcactctcagtgtgccacctaaagagaagccggttccataaatctctgaataccggtttctccttcctatatcctagaagctatatgtcattgtaaccctccctgccgtctgctgcatgagacgtgttcttcagtgtcaccaactaaagataactggtacccaaagaagtgatcacacacatcccctacccgcttagcatagccaactatctcatgggtctatgagtgcttattgcttacagctgagagatcacctactccggttcactgagcatctttgttgagcatctagggagcccaacatagctgctctcttagccagggtttctattcctgcacaaactattcatgaccaagaagcaagttggggaggaaagggtttattcagcttacacttccatattgctgttcatcaccaaaggaagtcagggctggaactcaagcaagtcaggaagcaggagctgatgcagaggccatggagggatgttatttactggcttgctttccctggcttgctcagctttctctttctttctttcttcctttcttcctttctttctttctttctttctttctttctttctttctttctttctttctttctttctttcttctttctttctttctttctttctttctttctttcttccttccttccttccttccttccttccttcctttctctctctctctctctctctctctctttctttcttttatagttcatacacaatggtttaattttgcattgcagttttagatttcaggaagccaatgtccagtttagttatagcttaaactctcccatcctttttttctggcattatctacctcccatttctccctaattttctttttagtatttattcatttattcattcacttatacaacattccagactctcttctcagtcctatgcttacaaatgcgtaatttccccattatctcttcccttctccccagaaacggggaagtacgacccaccctgggacaaatcagcttgctttcttatagaactcaagactaccagcccagggatggcaccacccacaaggggccctccacccttgatcactaattgagaaaatgccttatagctgaatgtcctggaggcatttcctcacctgaagctcctttctctgggataactccagcctgtgtcaagttgacacaaaaccagccagtacagacatcatatccaggcaggtcccaaagctccggcaaagaccagtttatcctaaagctctaacaagaaaatctgacctctgaccttctacgtcagggaacaaattaaagttaacattcctgcttatattgtgaacttttcccattacgaagacagcttttaacctccccatacttaaggctcaagtattttgggatgctgaaaagagaaattaaggtttagtccttaattacaggagtagtgatttagtcttaacattgtacccagactgtttccagccacttgaccttctactgtcatcctatagctttgagaactaaagtcagtaaagaaaaggtttccggtctgtgggtttatcatttgcaaagcaaaggtccatttttacagcgcttcagttagcaacgctttcaaagctggatctacctccagccaagcagctgttagagaaagcccttaccttttaaaaatgtggagcggtggctatgtagagcatcccccaaggggtacaggagttctggttttatttacccttaccctcggcttttgctttactgtcatgagagactattcttggagcataaggagcttcgcatcccttgcagactttcattggtggttagaatcttagaaacctcagtagctgaatctaggcttggtaaggtggaatacatctgatagagttgagctatggtaatcaaaataattcctgtgggttggacacagatttgggggtggggtgctggtggtggtagtggtggggtcctagacatctgtactcttttagtaagtgatatttagtaagtgatatttcattctaaataaatggtttcctcagtagcctcctagtaaagaaaactgtgtctgtcaaggtaaatatttaaatgcattttgtctaaacaacttagaatcgacaggattatttttattttgcattgaattcagctttagttcttttcagtgtaagctataggaggtcagaggttttaatgtaggcatagagagcagccatgagtaagacacatcagaaaagagaaaacagttggaaagaaatgaatttcaaattaacataaagcaaagagtgaatatttgaagtaacttgtaaaaatctatgcctgcagacaatccccaggacacctttaattgtgtgtgtctcagtcggattttgaaaaatagtgtaagttgttgtttgggaataaatgaataagggtaataaactcactcttgactgggcagtagtggtacacgcctttaatcccagcacttgggaggcagaggcagacatatttctgagttcaaggtcagcctggtctacagagtgagttccaggacagccagggctatacagagaaagcctgccacaaaaaaccaaaacaaacaaacaaacagaaaataaataaactcacttgtactgtagatttaccaggtctctcagttaagcttatctctgttactattgtgggatacagttacattcctttgctacagcagtggatccatgactgcttcagtctaggtgaggtcatttcctcaaacacagggatcaagcaggaaagagtagccacaacacagatcccacctagggagtcggaagaaaatggcattaatgtcattctgaagatcagctaaagtgcttgcctttaagaattaagattgccacatacggccctctgcaaaggtgaaaaactcactttccaaaaaagatatcaaattattagtagactttgacaacgagtgacatcattccttgcatctgtcatacatgtggtctgctagcattggtacacagttgtggagccccagagctatagaccttacttggcactcactggcttcagaactgggaccatgtgatgggtgctgtctttccagtgcataatgtgggccgttccccttcactgtactttagagttgagaaggaaacgggatgatttgggttcgaaagtgtgtcctgtgaatcttaaatccctcagcttcccccttttaaggaatcctcttgtcttcacagtgttttgtcagggcgttcttctatgtctgttttgctggtgatttaattccttgtaaattgttaatacttctgtgtataaaccaataatccccattcttctaaattgtcatttgtttcttggaagtaaaaaaaaaaaggttgaatttccaatagacacagttttagataatttacttcaataagctagataatttgttcaaagctccagacatgtctgcttccgtgaacattggccatttgtgtgtggattaggggttgagaaagcagaactcatacttgtttgtgcatcttgggtttcacaaatatatacacagcaaattccttaggggccaaagattttagacattctaatttcgctagttggcttataaatcttgtacaggtggaagcttccatataaatgtcacacccacacaaaaatagttctaatctggaagactagtcctaattgaaagtacacaaaaagtgtgtggacatgtgcagatcctgtagatgctacgtgaggctgtgtgtttaggctgctctctgcattgctgaggaagtaaagcaaacaaatatttcaaaacctccaataaaatgactcccataaatatccaagaagtgagcaagcaagtggttgtcagtttgtcattttcaggaggaaaacttcattaatattgccatgtttggatgtccaactccatgttagttttggcacagtttaatactttaggctaggagaatattactcacttaaaaaacagtatattatgccaaataggacatagacttcccaatatataatgcattagtagtatattgacgatagtagtagtcttactaagaaaatgtcattaaagtaaaacctaaatattgtttaatttgaaaactaaactgagggctggagagatggctcagtggttaagagcactgacagcttttccagaggtcctgagtccaatccccagcaaccacatggtggctcacaaccatctgcaatgggatctgatatcctcttttggtgtgcctgaagagagcgatagtgtattcatatacataaaacaaataaataaatctttaatttttttaaaaaagaaaactaaaccaaatgtgagtcttggtttaatctaagtttctaatttgatgaaatttagaagtctattaatacaataatcaatatgcctactacaatctatattggattttgatttacatggtcttcttagaaggatacatttattttctaaattaagcttctcttatagacataatcatttatgctttttaactgtgcataaggtttaatagttgcctacaatgatgcttcagatggataaaagatatataactgtttctatatgcaaaataattcaatggtaagacttttgtttaggataatttcccacagttctgtattaggtagtttctgtatagacagataaacatttagtccctcttatatgctgaattctgagtatgaaatggtgcctttctcaactacgttataaatttcataattcaacaaataaaataatcgcagatgtcaaattatggttaagtacagttacaggaaatcacagggtgttcaattaaaatatctctctgtgtgtgcataagtgtgtgtatgtatgtgtatgtgtggtaatatgtgtgtttgtgaatgagagtgtacgaacatgtatgagtatgtgtgtatgtgcatgtgtgtgtatgaatatttttgactgtatatgtgtatgtttgtgtgtatgtttgtgtgtatgtgttttacatgggccatctttatttagtttacacatggattctgtcaaactcaaacgccaaatgcgcttgtgctcagcaggaaccagctcttcacagagcagggtagccattgtcttcctaggcttactcttcagttctctggtattttctgactcaagaataggaaaaccataaccatgggaataactaaaggaatgttttggtaggaactatatcagattgtcattctttcaatatcattgtatcctccgaggatatatgtctaacttgattacatgcaccaactgtaacattttgtaagttagtatctaccatccctgaaccacagtgtagcagcgattgtcctgccaggaaacatccatttaagtgaccatgatcatgctgccgaacaggatcactcagaaaaaaaaacttcaaaaggagcaggagagggtggaaggtgggtagcaaagactggcctgcatccaaacatagcactgtgttccctgaacactgggcacatctcttcacttcattaaaacctcatacaagtaaaggttccaagtttactgctcttcctaaagcttgtttgcttccttattctctctctctctctctgttttatcttctgggaatttaaataatataattgaatcctgatacttgatctgtatcataattgaaccacatttgcttcatccttttactccaaggctcggaggctaaaggtcattttaaatgtgtgcagcatttggaaaacccacataatgaattcaaatcaattcagacttattaaaaggaggcttctttttctcaagttccacaacccattgcagaatacaccatgtagatttttgtctacattttaggaataaaaccccattatgctgctcccttcaatgtggcattgaacgtaaggagtgggaacgcccctgcttgccattggagcttttgatttgctaagtgtattttgttcagtcattgcatttaggctttggtggggttttccagctgccatgacggactgtcagcagctggaagagacaggttttccttttccttgtcgcatctctgggtttaatctaacagccccaccttttaaaagttttctctgtgtgctaggatttaggtgtaatttataagcactcaagtgttctacaacagcttcaatagcatacactagaaaatccaccctggccatgatggtgcagttcgtatggcagcatggggtagcatcgagatgacaaggagatctgtcaattgtcagcatggagctgcctccaagagaggaaaacaggttatgatgtgaaaatatcatcctatgttcacaagctcatgaacataccatgagggtattttggggtgtttttcctactggttgctcaaaagcaaacaatgagacccggaattccactccgtccctcctcacacacacacaaaaggaggagtctgaagatggctgcatgctttcccttttgtgcttggcggttggctgataggtggggaaggcccttgggtggtgtattggttttggttttttagaacagccttttggggatctgagtcacagagtagccacccatacacactgcagagtccattgtttgtagcgcatccacaattatgcaactacaatcaatttgagacctaattactccttgaagaagctcctaactctagctaacaagccccagctccctgtgcctctccattctgtggctcagagcagccgtttcctttgtgcatttgcctgaccagtgtatttgatatgatatgtagtctcctgtgacttgattctttcacttggtacattaccaaggtacatacatcctgcagtgttgtcaggtctctttctttctaagagtcttcttagccttttgtttgttttcattgagactgaaaatttgtgattttcccaacttactgcttctggagatctcaggattataggattttatcaatagcacaacttcattcttttttatgatcaaataagttttaatcattcattcattcattcattcattcattcattggttaacatccaagctgtcttactgatggctatttattttcactgcataaaatatttatgtaaagatttttatatgtgcataaaatttcattcctatagatgtctaatgaattactaggattgctgggccatataatgatttatggttttttgtttgtttgtttgtttgttttctgtttttcaaatctatttgtagtcccatcctttttgactagagaattctagactagagttattctattgagtggctggagtgttgctcagttagtccttggcatattttcctgtagatcatttttggcatggcattccctcggatgtggaagtgtgctctgtataagtgcttctcttcctaagcaccatctacaattcctcagaatgaaggtgaaagttacaggcataggaagggtggtggccagatgcttaggaatctgtgatgggagaacctcagactcaggatttgaatttgtgggatttctactatgggcattaatttcttttttagttggtaagatgactcaccagtatgggaagggacaatgtttttctggccctctctgacaagggctcagtctggagccttattaacctggactccttttcagtcagacacttggcactgcacagtccgtctccttgccatctgcccgggctgacattatttttagttgctagagcaaaagtttattggctgatttcctatctttacaagccaaggtatcatttcaaaagcacatattgtttaattcttacactgaaataatgtttcttaactcttctgctccaatcagtctgcctgatttaaaggtttaaaaagaagcaacctagttcaatacacaattgatagccagcattggacaaacatgaagagacggtgaagtgagccagagcagagaagtgtgctggtgtgtctggggtcccgtggtcctcttctgtccttcttaagaactgctagtaactattggtaaagcatcagagatgtctctgtggtcactcacagcagtgaaagataattagctgtcatagcttggtatttttctattttcctaaggaaaaacctaaagtaactgtaaaacacaccaggagattccgacgtctgcttttggctaaattcctctatcaacagtgaaaggagccaaattgcatttctttttgatgtatgctttcctagactcatgcattagttcaataagcatttgttaattgaaccgttttatgagtccacaccacacagtgatggatgcgttcttgcacggtacatgggagcacatgatttctaggtacaaacataactcattaccgtctcaatattcacaagccaagtgcttttcagatacattaaccaagtttgactttggttcatttaacatgtatgaattgaaacaacttatcaattgtcaatatggcatttctttaaaagataggcaaggtcagcaagatggctcagtgtggagaagtgcttgtcaccaagcctgatgaccagagatcaagtatctagaaccaactcccacacgttgtcctcttacgcctgcacacttggtaggtgcccctgctccaacatacatgtaatacatacatacacacatacatacatacatacatacaaacaactttaaaatttaaggaaagataaagaagggctaagcacctacctttaatcccagtacttgggaggcagaggcaaatggatctctgtgagttccaggacagcccggtccacagagaactctatgagacccagtgctacatagtgagactctttctccaagtaaacaaacaaataaataaataagaaaaaaagatagagaaaatgtatgtgagttaagtccttagtgataatgtgaaataatttggttttatcaaatatttataaaactggctatgtttagagagaaaagtatatttttgaggaataaaatcatggcttattttgtaccatgacgtgagaatgagtggagactgagtttgcagttaggagcagctagatagtgagattaacagagatgcttcagagcaatgatgacatccagtcaacctgcttcatatcattctatctctgaagtatctgtaagacaaaaaaaaaaaaaaaaaatcacaaatccctttgtgaacactaagctggggacacaggtgttaaatgcagtcagaagtggcccaggatccccccttttaaaaaattattaatttatcttatgtatatgagtacactgtagctgtaaagatgattgtgagctatgtggttgcttagaattgaactcaggacctctgctcaccctggcccaaagatttatttattattatatgtaaatacactgtagctgtcttcagaagagggcatcagatctcattacaggtggttttgagccaccatgtggttgctgggatttgaactcagaaccttaggaatagcaatcagtgctcttacccactgaaccatcttaccagcacccctctcctccccgccttccatttcttactgtcacttcaacatgacctgaatcctgatattcagccatcatgaagttattagaagatgggattgtctaggcatccacccacgttgggggaaacctgacacccctgtgttcaggctggggcttgccaaagtggaatcaatcatttttgcacattatcataactacaccataatatggtttcttggataacaggctttataggaaattgcctaaaggaacatgtaaaataagatataacacaataatggtttggccccaagtcaatatgaatatgtaaatacttcacaaattctaactccattctatcgctgagggccctttatattgtattcagatggtgggggcggtgggaggagtgttgctgtacttttctttctgttgctctgataaaagcttacacttctatgtcagtatccatcactgtgggcaggaactggaagcagaacccgtgaaagacactgtttgttgacactctctgactcattcacagacccgtgcttagctttcttttttcttttcttttctttttttaaaagattttacttatttattttatgtatatgacaagtacactttagctttcttcagacacaccagaagagggtgtcagatcccattattgatggttgtgagccaccatgtggttactgggaattgaactcaggatgtttggaagagcagtcagtgctcttaactgctgagccatctctccagccccatgcttagctttcttacacatcccaggaccacatttagttctacccagggagtgctgatattctacagacatgcccagaggccagtgtgacctatgcaattcctcagttgagggtctcttctatggtgactctggtttgacaataaaaaccaatctaccttatcaacttgacatacaaacacattagggtttaatcataacttttttcttgtcctcacaaatctcttattaataatgccacactaaatcatagtcctatgatcaatttcaataatttaaaagtccagtgtctccctaaaaagtccaaagtccctggaactagagaaattgcccggaagttaaaagcttgtactgctcttagagagggcttgagctcagttcccagtgcccatgctgggcagctcacaactgcttctgaccacatctacaggggatctaatgactatggtctccataagcaccaacacccgtgtgcacagacctcccctacatatgtgcaaactttaaaataataataaaaataataggtaatccaagttttgttttcaaatccatcaactcttaactgtgggcccctttaaaacaaacaaacaaacaaacaaacaaacaaacaaaaaacaagttacatacttcttgttccaaaagggaagactcagggcatgaaaatactcacagtaaagcaaagccagcgtcgtcaagtagtgtggctgaatggtcaccatccctagattccttccagggttgccttagacaagcctgcttcccttgacatcattcagaccttgcctaagccttaagtttagaggcttaggctgggtccctgactcacccgatccagccacacttacacagctcttttactgtattagttaccgtcctgttgctgtgataaaatactaagaacaagtaaacttagttcatatttccaaaaagatagaatcagtcgtgcagagaatagtatggcaacaagaacgagaacctggatgttcacatttgtaaatacagaaagttgggcaagactacaaagctccacagcccaccttcagaggcataattcctccagtaagaccaccaaagtttccataaccatctctaaaaacaccatcagcaggataccaagtatcccaatctatgagttaatggcgaatatgttttttattcaaaccaccacattcatcaatctaagagtctcgttagaggggatggagagatggctgaacagttaagagcacttacaactcttgccaaggacttgggttcactttgcagcacctacttggcagctcacaatgatctgtagttccaggggatccaatgcccagttgtgtcttctctgggctcctgcacacatgtggtgttcataaacttacacaggcccacacatatgcacataaaatatccaaatgaatctttgaaaaatttattaatatttacacttcaaaatacttagagtatttgtaatagcctcaaatacattcttttcttaaaaagtaatattcccggggatccatcccataatcagccaccaaatgcagacattattgcatatgccagcaagattttgctgaaaggaccccgatatagctgtctctcgtgaggctatgacagtgcctggcaaatacagaagtgaatgctcattgtcatctattggatggatcacagggccctcaatggaggagctagagaaagcacccaaggagctgaaggggtcaacaaccttataggtggaacaacaatatgaactaatcagtacccccagagctcatgtctctagctgcatatgtatcagaagatggcctagtctgccatcattgggaagagaggccccttggtcttgcaaactttatataggggaacgccagggccaagaagtgggagtgagtgggtaagggagcagggcagggggagggtatagggaacctttgggatagcatttgaaatataaatgaagaaaatatctaataaaaaattgaaaaagtaatattttataattataatcaattataaatcaatcattttatattctttgaaaaatatgaaaatgataggacataaataatctcactcaaaataaccactgccaatacctaggtattttcttacagtcttaagtccaggttcttaagttttatcattgtatcataatgatacattatgtataatgtataatgatacattgtatcataatgaagtttggtataaatacatactgttccatattcaaaagtatttcacaaattaaacatttagggtacttagtctaacatctaattttgaatatttaacatgttcctagtgattaaaaatatcagcaagaaatattattaacctggttgaccattcctgaaatcttcatctatcttcaattatgtctttagtaagttaattatgataaaggatatgaatacacacacacacatatttatagaatttttcttgatatgaaaattccaggatttttagctgggcatggtggcgcacacctttagttccagcactcaggaggcagagacaggtggatttctgagttcaaggccagctggtctacaaagtgagttccaggacagccagggctacacagagaaaccctgtcttgggaaaaaaaaaaaagaaaagaaaattccaggatttttttaaacatctaaacagaagctatttcactacttttcattattagtagagtctttctttgacttacttttaatatgcttagaatttattttaatgtgagtttattttgtgcccaattaacatcctgaaactgcttgtcgctttctctgtatttatgctcacacagttcatgcaaaaattttatagactgcctctcacatttttacttgccagctatacaattataatctacaaatataacaatataagtctatataaaagaactgcgtatggttcaccatggagcatactcaatggaaacttctatttttagcttatctctaactgtatttgcattttgccttgtaaatatctttatggctgtgtcctattgctaatcactacagaatcctttcttctttcttctcctagagagtcggttagaataaggacagtgagagtccttgcatctagacagagcagaaattgctggggtacgttaggaagtaggtcaagggataccagagcattaatgggaacagtgggaatcgccaagcagtgtgtgtgtgttgggggaacagcagtgtctggcctctgctgcacatggtatccagtcagaagcagtaatttttgtgtcttgaccgataagcctgggtcgtaaatttggtcctgtttaaagtcatgattcttcttgagaccagaaagaacaccagcacatgggtgacatattaattcctatgctgcagaggcacacagattgaattgttggcccagctcacctgtgtaccactggtagtttcttatagtgtgagtgccttctggatgaacagggaatccccatccatgatacctaaggcctgcatcccattttaaggtttttagacatccaacactcagcaaccaggcaactgttatcaatgttaaaatcattctatctgatactcctttccatctgtcactcctaatcccctttcctgtgactactacctctgaaagtctggaaattttagttgactttgttttggcatgaacatgagcagaacttctttgtcctttgacttgtatttggtacacatgggcttcttgcccattgagtactgtaggtcacaagcattacaaaaccagcgtgctctaagaattagaactgtactactttatacttttaaatatatgtgcttacgataattgaaaatgcactgggtgatgcatgttggcttgggtatagctcttcatataatcaacttttacactctctgacttaaatagtttcataacagagggttttcccccagtaatgtatggtttctgttatggccaagtgtgatcaactatatggtattgttttaaaagtcatatcacaatagtgtatacgtttgtgtgtgcatatgtgcacgggtgtgtgtatgtgtgtgtttgtgtgcaccaaaatggtccatagacaaaatgcgtgatagaaatgtatggcttgtaattgcaatcattttataaaacctgattagatccatataggcatacgtgcatgggcatacaggcactttcactacaatagaccatttagatcagtgttataaatatttgcttttagagttctcattcagaaataacatagtctcactttatctagataaatctcagcatctggaactataaaaacgacagagattccaaaatgttgaataagttgattgcaagtttactttttaatagtatgttgggttgcatgcagccccagcctgtcttgaaacaagaagtcaccatgcagaagatgtccataaatggttatgcatctctcagtaaggcatctgtgtaaagattatgtgactgttagtcattgtggctgaaagtttctcctaagattactatggtctccagctggtgattggtttttatatctgcattgctgagtgtacacttgactgacaagagcaaggacatttacttctgttattttctaggacagatgacctgatgggtgattatgtttttcaccttgcacatttatgtgttattagaataataaggataaaatttcaatgtggttctgtcccgatgcctttaaatagtatctgcagtctctagctagttttattttattttttttcttctattataacctaaccacacacagagagcttacagaaatgccaaatggaaattgaactgtgtttattgccattggctttaaaggctcctctgagagacttgccattatatataaaaagaaggataagggcatttctacatagatatgattgtgtcttttttataaaaaaaaaaaactctctagaaaataaatactctcgtattttatcagtaaatatttttctctaaataaaacttcctggacaataaaggatttgcaaaaatttggctgtttaagtagatattagttatttttgtgcattaatgatgtcgtgtgtgtgtgtgtgtgtgtgtgagagagagacagacagacagacagacagacagacagagacagagacagacagagagagagcatgaacatgtttattggattgcatccctgtttccataggatgctgttgaagtctctgaaagccttttctatggctgtaaggaaggaaaaggagtccggttccaatgcttactatgtacctgagatgatgctctgtgttttgtccacattttctcaggctccatcctgagctacacatagcacagtcctatccatatatacaggtgtaaaagcaagatgcagagaggcagggcatctgcacaaggcacaggactgttggcagaaccacgagtagaggccaaaacttcaagccccaccacatgtgttcaattgaaaatgacatttccgtgaggctaggatttataactccctgataggtagaacttcttgtctggcaagatttttctaaaacttagagacctcattgttactctaaattttgttctaactgttttcccccattgctggcatgcacagttataaaaataaattaagagtaaacagatacagcttcctggctgccttcatgtctgtgagtgtgacacagatctcagaaggaaaaatagcctgcaagaaggcctctgtgatattgcttatttacagattctttgcccatgtatttatagtatctaattacagccacaatgctttcctttgggggcaaagttgcacacttctctgaccactactttagaggaagctgacattgactgacatttccaatgtgtccttgtgtacccaagctcataactgtgacatttgagctcaaaactgtgttgccagcacaattatcactgcatttaccttcagtgggatccctggtagggatacttcagaggcctctttgtcagcaaggagaactttgcaaacaggctgccctctgccttgcaaacacacttccgaaaggagcttctcactgaattattttgcagggacacattattctgacgatgaagtaaacacattcactgtagaaaagctgcaactgctaaaagactgaattcataaaacatcaatataatggcaccacaccatgtgcctcctgaaatatatgcaggttgcacatgatagtatatattatatataagtgtaaaatgaccaggtcagagaggctggacatttcaaattattttactgccgtatttaaaatttttgtttacagtaggttatatttcagcaaacccatataagctaaaaatattgtgtaaaaaaggccactgaatatacttagctaatgaacaccatacctaaacattcttttaattgatagtggtcaaaacacaaaaccaactttccaatacaacattgaagactacctgtaaggcattgagcactagacagaatgtgtaaaatcgacaagacaaaaccaatagcaaacatataggtatgcttgttaaaaggttgaaaactccttagctgaaccatggcaagacagggactatctatctgagtatcctactgttccataccattttggttacaatagtgccacatcctgtaatgccagcacattaaagaggcagaggcaggaggatcaagagatctttgatagggtttgttgaggtggctcaatgataagaacatgttctacttgtccagaggatgaaggttcgattcccaccacccacatgatggctcacaaccatctgtacctctggccctggggatctgatgccctcttctggcctcttcagaccccaggcgcacgcatggtatgcaggcatccatgtaggtaaaacactcatatgcataagaatgagttaagagcagctttagcaacatagtaaaacaaaacaaaagttaggaacataacaagcagttcccatatcttgtaggataagcatcttctctcaccatatgggaccaagtatgtctcatgttctcacaggatcatagcagtttatccagaacaaaatgatttgtctagctctttctctcacatgggccatttactgtctcccctcctcttcccattttatttttttttatttcgccccacacccattttattaagtatctttgtaaaaagaaatcttaatcttcctatctggctaaatacttaggcaaaattttaagaaacactgttactgagtcaaaaccttaaatgtctataaactcgatgcatgcgatgtcgtacattttaatccaactaaggaacgtatttgctgtagagaaattttgtaatgaattattttttaaaagaagtaatagttcatttgtattttcataaaaatttcctcttcatgttttatgtataggaaagtaaagtccccaaaagagacagaaatatacaaactatcaaaccccactaagcagcagagagcagtggcatctttactgttaactcaggagagaaccagactgggttttctatttaaatgccctgagagtagagacagttgatttgttttttgtctcttcccccgcccccttttgatattataacacaattacaacatctctcccttccctttcttccatccaaaccctcctacatacctctcttaactctgcttcaaactcatggcctccttcactaattgctattgcatgcacatatctatgtacatatatatctctaagtataacctgctcaatctatgtaatgttacctgggtgtatgtattcagggctgactgcttggcactggacaaccaactggtgtgctcttacctgagataaaaccacacctttcctggttcccactctcctctcttgtctatagttttttatggggcaccactccaaggtttcttttaaattctgtagtatattttgacttttggaaatactgcttctgaaataaggacaagaatcattttcaaaatcttgttcacctttactggtgaaaggccgtgaggcccatcctgcccagagataggtctcaaacgtgaatgtgtatgatgctgtgcctggtgatgtgttttgtgcaaagtcctgtctctcctttatagacaagttcagttgctctgataatattctacattcaaacaagcagtccagttaattctgaggaagctagcctaaggctgcactatcagggataatggtgcaaaaaataaaaagaaacaataaacccttttgactcttgtgctttgacgctagtgctagatcattgtgtaatttatttaactgaaataaacctccgattccatgtctttgaagatgatagtactagcttctccctgggattgttaaaaggattaagttaaatattaatctgtgccaaaaaaaaaaaaaatcgaacgcaagccttaccaggcaataaaacctcaaccaaatacttagtcaactcgttagttatcatcaacgctgacattagatcattatcctgattagtagctggagacaggcttcttgcttcaggattaactggcctgcttgtttgaatgaagagtattaccaggtcattattcttgcactagaaagcgtaaatgtgcaattttaagtgattggcattgttggtgcttccttgattactgtctatactacagactcgtctaatatggctaaactcatcttacctaaatgtttctcattttctccctcttatcctcacctgtacacgtcattgaacttgaaactgagctgagatcagagcagtcggctcttggtgtttgacaaaactcactaagagggcaccagtacgaccttgtccagtaaaattgtggctttgatgcttgtgagattctgcaggctgctgagctgtaatgtgcatcttttgccagctgcagcaggtgtttgcttggtaaactctcccagatctctctcactggcatagccatatacctaacaactctctcaccagcatagccatatgcctaaaaaggagttcagagcaggcaattggtccacaacccctgctgtactgtggaggctgaagcaggaggatcattttttgagtgtgggagttcaagcttagcctgagttaatagctaatatggcaatgacatgcctcagtatgaagaaataaaaaacccaaagatttgaaaggacatggagatatccatatatagagaattcatcccgttaacagttctgaaagtcttatatttggtgccagaattgtcctaggcgctagagacacaaagcctcttaattttcagctgctgtctgcagcaatctttccagagcaaaagaatatgatgcaggacttttgggtactgttcaatgtgtgcctcttttgtgcaaaagattaatgtttctgaaatttctgggtagctagaagatattccagtcatttcacaatgtactgatttggcccaagaatctactcaggctaaaataggctgtgttgaaacacaagtcaaatgtaagagaaaatagcatcacaccagtaaaaatctctgcattgtccccaaagaaagatcctctccaaggcctatttcatgtttagttaaactacacaatgcagattagtcactgtgtttaatggaactccagagctgtgactttgtcaagatgggtaatcttccccctgggtccatggaaagagatctcaccaactggtacctggcagatattccctccttaaaatctgtaagcattcttgctcacttgcagaaccttgtacggaatatgacagggacagaacaggagccttataaggtgctggcagccaaaaagcttgttcgttttaaaaatcaagtgcaaataaatggctgccgagattttgtagctggggctggtacagacgggtgcaagaggtggcttgattgcctttccataaagcaactgctattatagctgagtctattgtcttacttgtccagggtaccagaccgggcagttgtatgcccctttagacacaatcacttcatttcagtgggatcttgattgtgtggtaggacattgcttttaattgatgtgaacatggcactcttttaatagcagaaattcttagtctgttgtccatgaataagtgtttggggtctataacttcttaaaataacagcaaacatttacaccatgctttgtcacgtggtatttttacatactttattctctggaccatcataatgaccccaccacacaggtgccgttttcactatcatttttaagttgagaaaaaaatgagcttaaaagggttaaataatttgcagatgacgtagcttaaaccatggtgctacaagtcagtgaaatcttgattctaatccaggctctctgactctaaggtgtgtacctagtcttaaccactacaccacactacctctcttggaagttatattcaaagatgtgtgtggaggggttataaggcagtgggtaggtacgtttatgaatttttaaggcttatatttccaggtcatctgatttttaaggatggtcagtcaccagtgtccaaaatttgacatcctctgctacagggtgggtaatgtgggtgagcttttctgagagtgagctgagctgaggcaaactggtcacaagtgcagggcagagccttccagggctccccacttgtcctgtcagttgagtcaggtggttagaagattaggaagatgagggggtcatgagctgagcgtctggtgtttaactggtgtgatttctcactttatgaattcctcactcagtatctgcagagctaagaaaagctacaggaaaacaagttaagcagcccaaagtcccagaaaccatacatatggcgcaccctatataactatatcatctcttgctaacatgttacctgatatgtcagccaggtatctactcaaaaatgcttatgctactcaaaaaactcttctattgtctataataaacaaatgattcctatgatgttgtttttcttgacccggaatgaatatgtcttgattacatcacagccacgtataaaagcaccttgatgtccaagtaatggtagaatttgtttctcatttggtagagactataaatagccattcttggagctgagaaagctgcctttgccgtccttgatagtaactggaaaggctgacagtagtcacttcatttgtgttttactggtataaagatgaatgcagtcagccaaattatggcaatcgtaattaaacaaaggacactccggtgtgcttataggtgaaagaacatgtcctgtttttgatactcttccctgtatactttaatgttcattaacccattttagccttcaaatgtgagtggtttatatctaacaagaaaatgccaagctcagagaacccaaaagccacggaacacattccaatctaggtctgtttccaaagcccgtgcactttgtatgatgctttggggacctgtatgggtattttaacatggaccactgggagcttgagaggcagtgaggaccaatagaggaacatgtaaacttaaagccagccatttctctaaagatcattcatttatgaagcacagttgtaaaaatccaaatgagaccgtggatatgaaacactaagaagacattcttcgctgttattagctatttgtctagtgttactcttggtagaatgcccatggagcaggcacagccaagctcatggatagtctgcaagggttgtctgtgtagactcagaaaacaggattagtcagggagtctgacagacagtaaatgccctgtgaggtgcaactcagcaaaattgatatgcagaccacttttcaggatatgggccaagttgttttgatgcatttggagacatgcatagatcttccaaccacagtcacagtgctcacagaactcatacttagagcctctgtgtcggaactacacgctgaaacccaggactgtgtgcttgctttggttccccaagcccctgcttctttgatccctttccaatgtttgccattgcttaagctgtgtttattttggtaatgggaacacctggcctttagatgcaacttaatctctacctttccaaagattacctttctggggtcatcttaacatgatgtcaaggcaataaatatctcaggtttctactcatcccaaaggacaccaagctcacattaccaccatctttcagttcatgcctttgcccttcccttacaccacatataaggcattttcatgctatatatatttttaaatatgcatggagatttcttggttaaatgcaggaattgatataatagtcaaaagagataacttcaggggaatgccagggccaggaagcaggagtgggtgggttggggagcagggggagcgagaaggggataggggttttcagagaggaaactaggaaaggagataacatttgaaatgtaagtaaagaaaatatccaaataaaaagaaaaaaagaaataacttcaattctctggaaactttctaatgcatgacaacctcttttgtcttccagatacttctggtccattatgggcacagagaaagaaagggatatattttattatttcaaatgaaaatgagaatcataatattccaagctgctcaataagacaagtgtcttagggtttccattgctgtgaagagcaccacggccaaggcaactcttataatgaccatatttcattggggctggcttacaggttcagaggttcagtccattatcatcaaggcaggagtcatggcagcatccaggcaggcatggctctggagacagagctgaagagttctacatctcattccaaaaaagcaaacagaagactggcttctaggtagctaggaggtggatcataaaggccacacctacagtgacacacctactccaacagggccatacctcctaatagtgccaatccctgggccatgcatattcaaactactataacaagtgacttatttttcttaatctgtgtgcaaatatgtataaacttatattcattatgtttaaatacaaaacaaatactcctttctttcttcatatgtatgtatgtatgtatgtacgtatgtatgtatgtgtaggtgcttgcatttcttctgatacccatataaggattgatcagcagtaatttgaaaatatgaagaaccagcctcgaggatattttttgtttgtttgtttgtttgagacatggtttctctgtgtagccctggctgtcctagaactcactctgttggccaggctggcctcgaactcagaaatccacctgcctctgcctcccaagtgctgggattaaaggcatgcgccaccactgccccactcgaggatacttattgtttgttccctgtttccagagtcagggtcttatgtagtctaggttggctcaactttgctctggagtccagaatgacccggaacttctcatgctcctgcctcagcctcccaagtacggggatatgaagacaacacttttgttcctgtttcataaattttcagtttgggctgagaagcacaaaacagtattgtatctgtgttctgcacgtgccttctcttggccatttgcctcggtgatacaagtaataaccacagtacatggggctcaccagcatatgtcctttataaagacactgctatgtccctttgataaatgagggatcggaatctcagacagattaagtaaactgtctaacactatccagataccactccaaactctctctttctccctctctctctctctctctctctctctctctctctctccttccatgtccctccctctccctcttttccttcttttctgcttttgtccctttcattcagttatacacagaatcccagcatcgaagatagataatgttgtagaaacacagggcacataatcagggagatcacaggaaacccatgtgactccatttctccttacctccatcaagccatggaagaggaatatgaggagagttcactgctgtctagttggaataagggatgctgaagttggaaagagccttatgtatcaacaggtcttgtgcttccaaccccataacctaccacaattttagaaactacaaatttctgcctctaaatccagatctattgattcagaatctccgagcatttgccttctcaagctcctgacaaagcgatgggtgagttagcaatgcagattgagggtagcttccctgtacctacccccactccccactgacaaagtaacttcaagcaacatcaggaggcctgagaaaataataaccagatgctagcagagtccaaatctacacttgagtccaattcccagtctaggattgggggtggggggtggggagttgctcttatcttgtgatataaagaaaggtaccacataaataatttctgcaagtctgtcctgctgtgttgctctgtaatacacttaacaagatgtatttaaatgtttgtttgagtaccttctaagtcgaattacacattgaccagagaggtcttaacaatgccattaggatgattaacaaggtaggggtttctaatatcttccaacgttttcatttggttacatagacacatgtaaatatgttatttcattttagtaaattgtcgtactccacgcaaaggttttgagtactgtgtttagataaatggtgtctctgcatcctcgggggaactcacagtgcagcttcttgaatctatgagagcctgggaatagcattaccttccttacagcccctctcatgagaataattcaagccacccctagagcctggtttctaagtcatggccaacatttcatcaaatactggaaatgagctttggaaatgtgtgagaataatgggcgaatgtattgaagcatctggctctgcctcgcttgtgtaattaggatgtgcccatcaatgttttactgggtaaagtgttgctgatgctgtcctgacttggctattgcccatcttactcatatgtgaacacactgctgttcccaaatgggtccagtgacataatcgtaactatactggtaggaaagaaatgtgtgggacaaaggaagaaggcacagggcggaaggcctatgggaggaaagctttcatctctgcctggttggagtgagaggccctcaaaggctcttgcatgtggtgaacagtaactcaccacagccctaagggatcattttcatgaggcctggggtgcgtttgtgggctcgggggcatgcatggaatggaaatccataattccaccgccagtttaaggagcggcttcttcctagggaaaagctaagagccggacaaataggaacagggtttgatttttttttccctttttataaattaaaattttagttctaaagttcacagatgcaaaaagacaaagggttacactttaagattttcagctacaggaggaaaaaactgaagcaaagatggtgtcaagtacctggtgctcacagagcttccagtgtgcatttcacgaggccgagccgcctgcacactctcattctcaaggcctagtttcaaaaaactagccataaaggaaaacctcagaggtcagcaaaatagaagctcatggcaggttttgtttgtttgcttgtttttatgtttgtttggggtttttggggttttttgttgttgttgttgttgttgttcattctaactttaaaaaatataaaaactacctcctttattttaaaattctatttaatgtatggggaaaatagaacttatatcagaacctttatttccctgtaaaaatgaacatgtttgcaattagattatcaccaagcaccagtggtaattatagtacatacctgtgctgcagactgagacgaaatactacatacatggtgcatacatgtgctacacactaagaaccacatacatgataagcacactaagcatgcatgataagcgtccatgatacactaagaaacacagtacacaccagtgctgcggtctgagccgaagtactacattcatggtgcatacttgtgctgcgtccatctacgatccagagatgagccatgcttggagcatctgctatgtcccctttctgatcactatcgaggcagagcagaactggactcaccttcattttataggacatcacagtccatgtaatgctagcgagcttattttctcccaactcctatgcatttcttgaatggtaagaaattccttaatgaaagtaggtgctagtaaaaaatttaagaaaacaaaaagaaagcaaagaaaacataagaagcaaggaggaaagaaattgatggtttcacggggtcctagaataggctgacatgagatgtttggaagtcaaatgttcctttagtcagcactgaaactttatgttgctataacatactgtgttagataacactgtgttaacaaaccccaaacacaaacaatgtaaacaataagttcatgtaagtaacattccgtagtagcacttaaaaaggtacttttctagcctgttctcaagaaccagtgaccaggaatcctcaggcctttctgccccccctctgccctgctgtagcatattctccatctacctgcaaggagaagggacgcctgggcaagcatgtggtgagaggtaggggtcgacatggagtggttccactcacagccagtcacacggccaagcaatggggccatctgtgtgggggaagaagctgggaacggaatctggcagacagcaaacaggatttgctccatggatgccttgactatagaacttatagttttcccagatcctcttatctctcatcacaatctcacccaaaaccatttcagggaaccatgaagatttgcaaagcccattaaagtcattgttaaaggagaccctacatccttttcaacagccaatcaaacgcaacatcttaaagcctaaaatacagtagctataatcttccccccccccccagcataacaaccatgacacaacaaggacctctctgcacatgcgtgcacacattcctgttctcttctccatgatgtgttttaagaccagcccagaggagaacagttgcttttggacatcagataatgtgccggtaaagcctttaccccggtagacgtaaagcaatgatggctaacccaagctgcaccactctctgaaaccatattctgttctcttctacccagaatgtggaaaagccatgtgtttgggtggctgaggttggaaactgagtaatatcacttctccaaaatagatttaatagcagggctggggagcggtttcctgacctgtgtgagggcgagtacagatcccgagaaaaacatggctgtatgagttttcacattcattagaggaaaaaaaaaatcagactcacattacactcttaaaagaaactggaataacaattacaattttgtttccaaccataattttaccttgactttgtaaatttattcaacctataatattttatggctaaggattttcctgagggagtcatcatttaataattcttacccattcagttaaggccttaggaaatataatttgagtaagtctaaatacaacataaccagggacatgatgggaatcacaatttttaacatgccaacttccgaaaggaaaatgcagtctctagggagacggtacacctgcaaggtgactctcttcagacattcagagtgactaaatgtcctgtttgatgggctcacccttatgttcctcagaaacaggggatggtcatcacaggagaaatgtctgcagaagtgtgccctagatctgaagaaagccgctgtttctcactcacccgttagggaaagtgctgctgtaccatttggccatgccattccttccctcctcctttctggctgtgggtccccatttacagtggggctgtgaagatcaggtcctgggctcttgcttactgcttgtcttagttccgtccttgttctggggaaggtaaagagggcataccacatagttatggattttttttttttttgtagtttgaaaaacataaggttttttttttaatttttaatttttggcaattctttgcgaagtgagctctcacaactgcatggcctttatgtgccataaaatctggacaactcctgatcacgtggctgattacaggtcagacttgaaaatatgtcaaatattcttgattaaaaggttctttgaagtttcttcccagatcatttcttaaagtgaaatattcagtctcatttctttaaacaaatggccaatcattaatcaaatttttaaaaaatgatgatgcttgtttgaagtagagccatacacttaaccacagtgggtagataaccagtagacagcagtgctgcgtctaaaggtacttataaattcacaatgtttttactgagcaagtactacccacaaggcacagctgtaggtgctgcagctgcactaatgaagaaaacaggttaaaatatccacacatttggaacatacctcctaatgggaaggagaccatagtaaataaaaattagtttatcaaaggctagtgaatattgtgaagacatagaggaaaaaataggttagatctcagagactaggatggtaattttacataggacagtatgaggctagcccactatgcagaaattttttactatggtaaaattgagctaataacttgggaaaacattacccaggccgagagcaccacagtcgtaaagagccctaaacaagaacatgtgcacatttcaatggaaagaaaggcgctaagtgacccaagatgaaagtaagatgtcattagagaaacttcggggacccagatccccaaaggcctgtggccatcatgaggacatggggactggtgagcagggactttgccaggacctgattatcatcttagcatgattattctgtctgcaacttggagaataagtgtgagggagtgggaggacgcgggggcacagcacaaaaatatgtctcccagtgcaagcttcttaaaacaattttagtttgttctgtattaaaaagaaaaggaaaaaaagaacagaaatggttgttctctgcctcttctttgcctgtggagttggaaaactgtgtttgggaaatgtggtttaaaaaaaaaaaagcctgatagaaccagaacaagggaagggaaactgagtcagcgatcctcacagggctctttctgacagccccccccccaataagtcagtctagagaactctgtcctttatatgttatggacagtaaccctttattaaaaatgtggtttgagctgggcacgatggcatgcgcctttagtctcagcacttgggagtcagaggtgggcacatctacatgagtttcaggccagcctggtctacaaagtgagtatctaggacagccagggctacacagagaaaccctgtttcaaaagaccaaaaaaaaaaaaaaaaaaaaaaagaagaagaagaagaagaagaaaaaggtttaaaaatggttccatccacctgtaggttgcttttttttttcccgtgttttttggtttgttctttcctgtgcagaatcttcttagtttgacctaattcacttgtctgttcctgtttctattctcatcctttcttatgcatgttcatgcattaaaagactaaaattgtgggacctgtctctactgctcataataaccagcaacgtttctgcaatgcccacctaaattccaacatttttcaatgaagtagaaaagcaagtctactagcaactctgaaaattcatatagaaccacaaaagaccacgaatagctaaaacagacttaaaatattgctgtatatgtgtgtgacttactgtgagtgtgggcgaacccatgccatagcacacgtgtggagttcagaggacaactcttcggagccttcttcgattaagactctctccttgcaaactccctcaactgttgtcatctctgtggagcccttgttttcaagcacagtcatattataaacaacagcttccaggattaaatatttgatccaccacactggtctaataagtgtctcataagaaaaatggagtctgtctgtattatttgaccaaaatgcacaaggccagtccagctttttttctcttatatcaaactccactatatgaaactccaggcatcaacttcatcttacatccccttattgtcctgtgttacttgagactgtcacttgtcactgacaagccataaatgactattgtttcctgagatttcctgatacttttactagtaaactgtccaatattttactataaataagtatatactgtcaatgccaggcttttgctcatgaaaaccatgtgtgaaagagtaataaaatttagttcatgtgctctttctctctctctctctctctctctctgtgtgtgtgtgtgtgtgtgtgtgtgtgtgtgtatttgggtgcatgctcacttgtgtgcatgtgtgcacatgtataggacagatctgtggtgccagttttctcatttcacctttatgtaggttatgggggtaaaactcagagggcaacaagttcagaataacaagtgctttacctactgtgacattttgtagacaatactgcggttgtctttttttttaattgaatattttatctatttacatttcaaatgttattccctttcccagtctacccctccccctgaaacccattaccccatcttctctccccttacctctataagggtgttcccccacccacccacccactcctgcctccctgccctggtatttccctatactggggcattgagcctcttctcccattgattcctgacaaggccatcatctgctgtatatgcagctggagccgtgggtctctccatgtgtgctctttggttggccctgggagctctggggagggggatagtggtctggttggttgatacagttgttctttctttgtggttgcatgcctaccctttatggaaatatacataaaaatgcacacaaacagccagagtaacatttaatctagcaaggtaataaaatatcctgagtatcctgtttacatgtgatgttcagtttttggttgagaaagcatcatatgtgcatatcactgtatgcagttttctatagactctgtaaaaatatcaaaatagttaattttgtgaagtgttttctttattgcagaattgctatctggcttgcagaaaactgttgagtggtcccatatcactagtgctcataagaaacacattttataatcataggggactgataccaatgagtgaaatacttgatatagagaggaattcttaatcatcatccagacatccttatacatgaatgagtgtgggcatccttctcctccccagtggctagacaccaagtagacccattggatagccaacagccagggatgctgtactcttggggcagttaaacaaaaataaaaccaaacaaaaaaatctccataataatgtaattgcctctaggcgcacactacatctggagatgaaagactgacacattgtttctacccactatattcagctacagcctgagcaattctggggacctctatgccttctgtatttcctaccagggaagtgttctttccccttggtgagtctctacccttctgccaggatgctaccacaccagtatcatggaggagggtagatgccctcaaaacagctgaagctgtaagaacaaactgggccagcatctgacacctcattgatggccagggcacactcccctgatctgtcccatatgtcccttcctccctcatgtctccatttagattcttcaccaaagtgttgtgtttagacacacagagtgactcacatagagacaatgatcttggtggatgatctcagtggaagataaagattaacaaaactaaaacattggccgctggctatcctgggcatacactaactaccaggcaatgagataaatgctttctaaccatattctcttctaatcctcataatggcctcagaactacctgtgtttcttcatcaggaagtgggactttagcaggtaaatgatttagctaactaataaggaacagaaccatggctcaaagtttaaccctgttttttctaacttaagccctcttagaatcccttcaccttaaacgtggaccacaaagcctgtgttgtgaacacaccctgatcctgagcacacaccttcagaagcagtatacagctgcttcgttctggctttacttaagggtcctagggttcccctgagcattcagccaggcctttcccaggaagcctctaaacagaatgcttagtccaggggactcatgttgataaggattcttaggagattagccactgtagtccttattgggtctcacctcacaaccctgcagttggcattgcgtatacgatcctaagggctagaggaaatgaaatgaagaattcactcaggaacaaagcaggctcagggagagacccacatgatagttgagaatcaaaatattcccaccagaatatcagcatctaccttcagggaaaaaaaaatggtgagaaacgacccttagcaaacagttacaaggtgagtagacaggaggcatgggcagttacggcttctggatcggaggtagataagactccattactattatccattgattgcactaaaatggaccaatggggagatctgggcgcagtcctgttggttgtccagcttttctgatttctgtctgtctcttgaggaaagaaggctccatagaaaaagattgccagccacacatagccttcgagatctctgaatgcatcaggccaacaggtcctgactcttactggtccctccaagggaccaatatagttgtaccatcactttcctacaactgtctgttggtgaaagccagctcttgtaagacgtgtgaatgcctgtgctgttgggggagggaggggagaatacacggggcattatagtatctcactgttgtccatgagctaattcccctcacagacttccagacactcccttaatcccaagagaatcctccgatcctgcaaagaaatctcccaaatgggctgtcgaagaatctgcattacaccctgctggtgtattcaagtttttttttgaatgaaggtttagcaaattgcaaaatgttaagttgcagaatgacctttggcgtgtgcgacccatgagttgcccaggatatggctttcaaagagttaacactgaaaggtctgtcccagtaaggatgctaagagctcttctgttttcttaccatcataggagacattgaaatacaaacataagtacagtgttagttctcccaggctctagagtcagacagtttgggtttaaaacagatacctgtgaagagtagctcccaacacattatttaatgtagaggcacttttctagatcacagggttgcctttggttaaataaaaactagggaactgtggtggccccttccattagtgaggatgtgatatgcagaaagcagaatgtggggcacacaaagcacccccccaaaacttatcatcattgtcaatgtcgttattatgatcggatactttgccccctcgattcttttgccacgttcccaagcttcagattatattgtgtcttgggcttcacctgactggctgtgagtctggtgggaattcagcaggcctctgtgtgaaccagaggatgcttaggaaactcaccactccttgtctccttgacgcaccccccatctctctctctctctctctctctctctctctctctctctctctctctctctgtgtgtgtgtgtgtgtgtgtgtgtttattaataccaaggactgtggatgaaaccatgtttcaaaaccgagcagctcatctcaagtcatttctgttttcagcataaaatagctctcagtttaaatgaagctaattttcagaaagctaagcccataataggtagtctcacgtttccttgatttgtagcccacagcgtgaagcaagaactgacttttgttgtttctaccgaacaagacctctctgaaggtgtgcccctccttctcatagttgaagggtttagttaagaagccttttatttgggaggggctcccccctcttcctttggttctcgatttattttctatttcgtggctattctactttctccacagtcgcagaaagaacacctttatttttacaaatgaagccacatgaatgtaatgagatttaccacatctcagacctgggtattggttactaaatggccatgtatctttccacacatctctttatagcgatctgacgtgggcacgccttggcctggtttctattcacactcccagcctacctgttggctgtaccatacaatgttgccacttttttttttttaatgtccccatggctttttagtgccagcccatgaatgcagtctatctctgtgtcctgttcaaatacattcactacaaccctttgccaagcttgcttctgttgctcccctttgagcatcttcagctatgcctgggctctctactccttccttgcactaagcttcctttatatctgttgtctcttggcatatctgatttcccagttcatacagcactatgctttattgtttggggactattcataactagtgctattcatttggcctttgttcctttgtagattttttactgcctcattgagaaatgttatgcttcatatatctgtgcccccccccacacactattaatctaagaacaaagaactatgcaagcttgttcactaaattcttcattatataaaacctttctataatgttattcaccactgttgatatttggtaatactttgagctaagtgttttcagtactctagcttttgcttgatgatgaatgttggttaaagaagcacttactatactggaaagctggatgctgatggaacctcagactaaatgcctacctcccaaatcactctagtctgagaaaacttgcattccccaaatgtaaaaggctttcccagcctaccactgatatcaatggtgctttgcttagtataacggacattgagtgatgtactgtggaggatcagtgatgtcttcctgagtaattttaaagtaaaggcccaatagaatatcagttactgatctcagcctctcctccccagcctggtcctagggcaaactcttcaccatgtgtgcatggtgtgtgcctttagtcccagctactccagggactgaggctggaaggtcacttgaacctttaaggttttttatttgtttgtttgttttgtttttcttttttgtttttcagtttggtttttcgagacagggtttctctgattagccctggctgtcctggaactcactttgtagaccaggctggccttgaactcagaaatccgcctacctctgcctcccaagtgctgggattaaaggcgtgcgccaccaccgcccggcttgaacctctaaattacagactagtctgatcactctttgaaaaagaaagaaatgaattccgtttcaaagtaaagctcatgcaaatgtttcacagattggtatagttttaataattatttatagcagtttaatagttttttgtggcattatcttaggtaatatttaagaggtttgcatgagtctttaataggtaatttagaccttcctattactttataataggttctctatatttaagagcattctctccatctagtggacaaagtgttgtattacatctgcaaacaaatggcaaagtccaggtataatttactcacttagtaaatgttttgatttccatggtagcattattatcaaaatattttaagatatttagtaatatgatttttcaaaaatctacaatagggcgtctatatacgtttagattttcttaatggaattgaaaaaaaagaacattgtatttaaaaacataaattaatgattgggggaggggggagaatgattcagttggcattgatccagttaaactgagaaaaagcgaaccccgaagcccatccttccatcttctttattgttcctaggatatggagacagaagcctccttctgctccacttaaccctaacatcatcctgctaataataagaggaagcttgcacagatgcttcgaataagaggaagcaggcacagatgttttgtagagcatttccatccttagatcctccgtgactctctccttaaagggaaatatattctcatccctcactactcttctgagcagggtcttcccaatgcgtattgagtaatgctaaaagctcactttacttactactcctctacggaacatcacaggttagcccggactgaattaatactattgcttttatggtttttaatcacagtatactcatagtaagtgtttgaaaaatgtgtgttttataaatagcacccaaaaagagctttcctaattcccctgataacactctttactacctacacccctgccttccctggctgtcctgaggatagccagtgtgctgaagagcatgtcacacctacctggatgagcccaagccctcttgtttggtccacagctactgactcattcgtgcctcgtggaatcatgtattctgtcagggaggacttcaggaacaatacacaataaagccttagctcactgacttctgtcaatcagcttttccagaacctaccgtctttgtctataaagtgaagggtttaattagataatcctccagtgtcttggcaggaccaaataaatatatttataagatgacacaattctaacaaaattattaaaaggttggagacatggttcaattgataaaatccttcacacacacacacacacacacacacacacacacatccatacaccacacacatcaccacatacacacaaagaaaatttgaagttggaaaacagttttctgattacctaagctacactataccatctcctgttttttgtttatttgtttgtttgtttggttggttggttttgtcttttctttcctgcttaaaggtttgattcgggtgatgcatagatgatcaatgattcagtgttccctacctccccagcttagcttacttagaacacttgataggtgacactgcgtatgaataaatctaggaaagaaaattagaaaatgttttaacctaatgggccataaagtgtgtgtgtgtgtgtatgtttgaagaagtggttgcacatgcacatgggcatgctaaaaataaaccccagggcattgtgtatgtagggcagcactgtacaattgagctgcatgttcagttctggataaagattctaatggggccatgttgataacagtttaatttgaattcatttgtgcattcaataatttcctttagctacacaccccctggcctatcccaggctgtcactctcttttctcaagaatagatgagacttgagtttgatgttgattgatgtctcactagaaaagtttttttttctttttcttttttttttttttgagaaagtctctgtgggttctaatgactattctactgaaaactgcatatatggctattttttgtcctccaactctaaattctgtactgaactcaatgcatttcatttcttctatgttcatttacctcacttagtacaggggtttgctgttctgggttatggtgctggaggttgaacacagagcctattgtgtgtcagtcatttgactctaccatttatctatgcttctagccccagtaaaagacagagacatcacatatacctacacctacacctacacctacacctacacctacacctacacctacacctacacctacacatgcatgtacacatacaggatatgtcctttgggaattgggtagaacatgttttggtcatattcaccctctctcctccaagtcttctcatattcatccctttttgctttcacacccacctttacatctctctgaatccaggtcaatatgttctacccaagtattttaggataacgtggctttccacggaagcattgtacgtttattaggggctgcactcttggagacaactgatcctccctctctcaacagccactcacaattactgttcctcagctaagagggacactttgtccactcccaactccattcagggctttggtctgttttagatttgcacaagtgttgtgcatgctgtcaccacatctgtgaattcatattgcagctaccctgttgtatccagaagatattttgttgtactcatctactattgatggctctaatagtctttcctcctattcccttctacagttgttcttgagcctttggaagagggatacaggacatatgctccacttagagttgggaatgctggagtctcatactgtctctccctaggccagttgtgcatttcagggtcattcaccatctattgcaaatagtcaccgaccctaagatgaaggatgagagatgcactaatctatcggtataatgatacatcattaggagtcaataccttattcatttagcatcataatattaataggttcctgacccatccaataaaggcttttgaaagaacacataaagtgatgagatatctcacagtccattttgtgaaagatcaaaatctagacagtaagaccatgtagtaagtgttttcaattaactgtcagtctcgaccataaggaacaaacagggcagtgtcattgggagcatgaaggatacttcccaagactgagatttcttgcaaaacttctagatagaagctaagttctgaagaatgaatgtcggttttcttagcaaaggagagatagataatcaagagaacaactcaggaagcaagtagccagagaggattggtagttcaatgtgagccgactgtaaagtgccggatggtccaagttgtaccttgggacaagaaggtgttttcttgcaattgagaaatgatcaagacctacagtctagctaagacgtttttattttattctgaagcaaagatgaagggtttctactgatggatgtgtagtcagtattatttgcattctaagatctttagatatttgtgctcgataaagactggaaaatggattcaagaaactactgtaaaggccattatgtgttcacagcaaaagatggagaaagaagtgatggaataggaatagtgtgaaaaggaaaagaagcccattttcaggtggatcatgacatcagacagtggcagttgttcaacagaactcaaatatttaccgaattactataaatttgctctttttctaaacaggaattctgtgctcagagctactttgcagaatgatctatttttttttaaatgaagttagattttgaaaaacttatgccttttaagttgtcaaaagccaaggaatataagaatgtgaacacaatgttatgtttacagttatgggtttgtttgtctgtcttctgtctgtctgtttgctttcagtgctggtgctcaaactcagggtgttacactatgcaaccatgataccactacatctctagttcaacgttgtaatttttactagcaagaatcagatgtaatatcttcccttcattcctaaaatcaggctaactgttctgctgaggtaccagcaggccaatgctcccaccaacgtaactctcttcctctattctcagtttcgatgtggacaatggcacatcagcgggacggagtcccttggatcccatgaccagcccagggtctgggctgattctccaagcaaactttgtccacagtcaacgccgggagtccttcctgtaccgatctgacagcgactatgacctctctccaaagtctatgtccaggaactcctcgattgccagtgatatgtaagtataagggtgggcagaaaaggcagaagtacctagaaaaacctgagcagattcatctctggagtagatgacgtcataaatgatgatttcatccaactacatccttctcttttgatgcagaaagtgaatagaatcctccaacctgaagaggaatagtaaatttaacttgaatgttctggtaccttgatgaaagggaatgacatttttttcagaaaatatattgtttgggaaatgtagaattaaacatttaatggaaattaccctccaaacattagcttatattatacatcagtaagactaaagctttagatattcagccacatgaatgttttctaatatttttttacaagccttaaacttaggttaaagacccctttgacacgaagatggacagtgtgttgactatgtctcaattgatgtgtacagtcatgaaactgataagatcttttggggattttgtacaaatggaatgaggttctgaatataaatcactaggtgcaataaactcaaattcccttaagacatgaacagattagaaatgaattaaaactaacggggttgcaggtaatacagggatacagttcatcttataggacccttgtgggttcagtgttattcttggtaccctagaagatcaccaaggcaatagaccaagcaacagccccaaataggcttctagaaataaaactagactttgctcagtttgtaacctttagttctcagttcccacttcttgcactcgttgtattactgatgacttctcttcttcctaaataacttcccattgctgggggtcatttgtgttaccctcatccctcttctataggtttgaaaatgtccatagaatgtgtatttattcattcagacacagtgagaatatgtattgaactcttagaatattccttgagttcttcatctaagaggaaggaaggactggtattaaactatttgcaataaaatgtgagttttacaaggaaagcactctgcccaaaggaaataacaagaaaataatgggttcagagaacagttctgtaaaatatggagaatggtacattgaaggcgtgatgtttggctggacgtgagaagcagacagtaagagagaggaaaaatcagagaaagcccatgggacccagtgaagttctttggacttctctatgtttcacttttattatactttgattattattattattattattattatattttgtaatggtcatacaatgaagagatgataagaaagtgattcatttccaatatcatcatagaaacataattggttacatgggatgaaaatctagatcaaggcagtgaagtgcagattagtccagatgttagaagcagaaggcctatagaactgtggtgtgtgtgtgtgtgtgtgtgtgtgtgtgtgtgtgtgtggctggtagagaaacaaaagttcacttttttgacaatgactgtgtgaacagatgtcagtattaacaggaggaagaagagacagacactcaatgtggattcagctttaacagaacaggatggggaaagtttgcgacttgctggcaagagaaggacaaaaattagaaataatagtctacaggactagaagagattagaaaaaccaattacctctgtaattactaggtgcttagatgctatttgagtgaagtaccttagtcaggcaatggagttagaagcccaactaactggggagtgagttgaaagcagttctctaagccagcgaatgcctatttttagaaaatcaatgagaaaggggagtgagagaatcaaacctgactaggaaagaaaaaattcaagaggaaagaaaaatttaattaataacacttgagctgagtgaaggcccagaagctagagattaaattcaggaaaaatgaagattacagatagatgtatagttactgacacaattgtgctcaagaaataatttctggaaaaatgataaaggctgagattgtattcttttttaagatttatttatttatttgttttatgtatgtgagtacactgtcattctcttcagacacaccataagaggacatcatatcccattacagatggttgtggttgctgggaattgaactcaggacctctggaaaagcagtcagtgctcttaaccactgagccatctctctagctttgtattctttagagaagacaaagaagaaatacaaagacagagatgaaggagagaaggggttagagaatttgtggcttatgacatctacttttcaatcaaataggaggcttagccattgtcaccagtgagagtggggtaggcagcttgaggacaaggtgaaaggacaaagccgttgctcacccaagccaggcggtacactcctgtaatttcagctactcagaggttgagacaggataatgctgaattcaaggactgtgtcagctattgacagggtcaagtactatcctaggcaacacagcgagaccccgcctcaaagtcaaaagtacaaatagggctggagatgtagccccccagtggtagagtgcctacccagcataatatatgcaagactcatacagtggagaagatcaataagctgatcaagcaagagaacaatacactagagggattgatagaagaatacttagttcaagaatccccaaggatagccaaaaaataagctgtctagtccaacttcattaaaagtgaaacaactaaatagacaaagcacctctgccaaggaccacagaacattgaggaagaggggcggaaagaatataagagccaaagaacagagagacgtatggcaaagacatctggatgtgacatggtgcggccattgcaatcatggactctctgcagctctgattgtcttcagaagaccaacacaagattgggcctgccagaaattcaccatggatggggaaggggcccatgaggctccacccattcctaagggactatggttagtgaacaggcaagacatgctaatgaaactcagtggaccccacaaaggtagacatggaagtgtgaggaagacttgttgggaagaaagaaggagagggaggggttaaaaacaactaaaatttgttatatgaatgaaagaaagtattgagcaattaaaaaattattagaaagaaaggtaagagaactggaagggggaagtatcttagtggttaaatgctctgctctctaaaattctagaaaaagaactttgggatgctaatgcataggccgtgtgttccatactctctattcaagttagggaagactaaatatgcagctctgttttatgaaaagctggtggtatttcacagtctaaaaaagcctttatttccaaagccctatacaagaatgacctcattttaccctgtaccaattcaagacgtcctttatctgctgggaggactcacgtaggaatgacaaattgaatcagaccatgaggcaactctgtaaattgttgaaaaataatgccttgacgtgctcagctttctgagttcctctgtgtattttcccaggagaaatgaggcatttctttcacacttgctgagaaacaagataaacaaagtaattatgacttcatgtttaatttaatacagcatttatcttccacacatacataactctgctctccctttatttgatggcttatgtggccatgtgtgtaaacctcaggctcctttatttagttcccagcaatgtgcaatgtccatagctctactacacaactgtcctttagagagaatcatcttaataaaatctactgtgttcacttgatgattctgtagatgttgttcttaactagcatttcaacagataaaatcgcttagcgtcaggagtttgtaactctttgtttgaatgaaatattttagaaaaaacaaatcctctgtaagtttgggtataattgtttaattaattagggaatgagaagaaagaaatcatcacttcctggcaagatgccactgtcttatcatccataaataagtattaataagtagcagatgtacacaaaggaaaaatacagcagcaatggtcagaacataaatcatggatgcatattacacttcacttttctgaggatttttgtatctgctgtctcatttcatcctttgcttctttaaagatttgtttatttttttatgtatgtgagtacagtgtagctgtatagatggttgtgagtcttcatgtggttgttgggaattgaatttttaaggcctctgctcactccagtcaaccctgctagctccggtcaactctgtttgttcagtccctgcttgctccagcccaaagatctatttattattatacataagtacattgtagctgacttcagatgcatcagaagaaggcgtcagatctcattatgggtggttgtgagccaccatgtagttactggaatttgaactccagaccttcagaagagcagttagtatgcttacctgcggaaccatctcatcagactcttcgcttcttctttttttattagatattttcttcatttacatttcaaatgctatcccaaaagtcccctataccctcccccgaccctgctccccaacccacccactcctgcttcttggcgctggcattcccctgtactggggcatatggtcttcgcaagaccatatttgaggggcctctcctcccattgatgaatgactaggccatcttctgctacatatgcaactacagacacagctctgggaggtactggttagttgccatttgtgaataggagacccaaagtccaaaaatgttcatcttttcaaaacacaataaaagttttgatcatctgtaaagaacatcactttgatgataccattgtgaacaatatttgtgagttgatagacaaacccatttgactaatagaatgactatgaagcactataaaaatttggtgaaaaataaaccatgacaaatcttatagtgcataaaatcaataaggcagccatgcatctgactcagaaaatgtgtgcatttctatagtatggaaaaaagttcagagtctacaagcattcactgagagaagatagatgtttccagaatcttctgctgtgtttattaaacacaaatgtcaccacggtgacttgattgataaacatgcttatcatgtgaccatcagcatcttcgtttggatctcagcaaccttgtaaacggtgcatatagcagcaggactgtgatccctgcattgtcgagatggaaagagttgctggaggtcaatagaaagccattctagagcaccagtgaactccatgttcaccaggagacagagtctggctccaaagtaaggtgaagaagtcattgggaaaacactctcagtcaccttctggcctcaatacacatgtgcacatgcctccccacacatgcctgcccatccacaagtacacacacataagtgtagacacacacacacaagaaaaataagaagcacgtcagtgttagtgagcgtagcaaagatgtaaacataggaaaagcagatataaatcatacttaataataaaacatttatataactgtagacacaaccagaaaaatgacagctgaccctgctgtgacatgaatgaacatgaggagaatggaataataaggagacagtgtgtttgaaagcatgaagggagatgattgcaaagattaacgggacaatgagcaacaacaagaggtgcactcatcacttttgtcattgctgtggcaaaatacctctccctccaccaaaaaaaaaaaaaaaaggcagtttaagcaagggagaacgtactctggctcacagtttttaagtgtgcagtttaccatagcaaggaaggcatggcagtgagactgtctccagctgtagtggcaagggtgtgggaagccgatcggatagcttctctggaaaggtcctcacagacatgtccagaaaatagtctactaagggattctgaatctcatcaaacttgacgacaaaactaaccaccataggagacaaggatcattgaatctgaaaacccccaatccagtgaatttaagctacctcccaaactcattaggttaaagtcaattcacctggataactggacctccattcctatcctctgctgactagcccatgacatatagaacctagagatgactcagacagctcttccctcatgtttacctactgtactcctacacacagaatgtgcagtaggggttgaaggcacagtgatgtgggtggattcattttaaattgaaaagccttggacacttattgctgggttcctttcagatggttaaaacatgttattcttggggactttcttgctggtggacatatctccttacccttttgttcatactgccacatcttccttcacagttacccaatgtcacacacctctagagcccctggtgttggttttctgtcagagctctgctgtggtggtttgaatatgcttggcccataggaggtagtactagtagtaggtgtggccttgttggaggaagtgtgtcactgtgggggtgggctttgaagctctgctcagtgaggaagagtcaatctgctcccagcttcctttagaggaagacatagaactctcagctcctgcagcaccatgcctgcatggatgctactatacttcccacctggatgataatggactaaacatctgaacctgtaagctagccctagctgaatgctatcctttaaaagaattgtcatggtcatggtgtctctttacagcaatggaaaccctgagacaccctccttcttttagcttgtgcctactaagtagcttggtagtatcatcttcagagctgggcttaaggaaggcaggagagaacatatctattcatggttttactctgggttaagtaattcttccttggactctttctgaaatgtctcagaacaaaaatcaaaacaaagcagatggttcattggaaagattctactccccactgaactacagaaaactgtgtaacctcttatagacaaattttagattttaatacgctgcatagtcaggcttctctaaaggaatagaacagatacaaggagagtatatatgaaatgtatgagaggggcttataggctgtggtccgggtagtccggcgatggctgtcttacagcagaaaagccaagagtctggtagttgttcagttcagggaactggatgtctgaggaatcccaatctgatgccattgaccctgggaagtcctaatgagctgctggtcttcagaagtctatgttagaatccagaagaggttcctaatacctgggaaagaatgaatgtctcagcagcaggggagatgaacactgcaacaagaatgttaaaaaaaaaaaaccaaccaaacaaacaaaacaaaaaacaaaaacaaacaaaaaaccctctcacaggtttacagtgtttcattccacctcaaatgatccaatcaagaaaacctttcacatgggttgagctgcttctgtttttagttgattccagatatagtgaacttgaggacagattagcatcacatatactcctaaattttttaaactcatctgatttgtcaattgagagccatctttcatcaacttaagtaggaagttatcaaagccaaaccacccttccccattccagacctctcccagctgaggatgttaggttaatgggaccaggggcagtgatgcccagagggaaatcacacaggtgggaggaatgcttttactcctcaaggaaaccaaaatatttgtcagtcacctctaacactagcagctttatattttttctgctttcatctttagatcatagcagcccttcaagtcatcatgtctttataaaactgggttttcagcgattgatggataaaaagcaattgctaaagaaaagtctcctttcgcagtaggaagctgtacagtgctaaacgggtcctgagttgttagggggaaccttatgaaattgtttggacctaactacttattcattggaactatcggcgatttctttgggcaaagggagtctcgtaaataaaattgagacatcagaagcaccatgaactgagcttgaaaagctctatgtaaatgtatttattttatttatatcctgaagattgaagcaagaccagccatgtgagacgcagcttactgggtgggggaggggagccgtgacatcaggttcacctgaggacacctggtttcccagatcctttattgtcatccaaagtcacacagtctcaggtacagtctaggtggcccactcttctgcttctgtagctgaccactggtattattgtcactgtgcaatgttagtgcagagtgacacagatctttatgatttctagaagcctggtggcaaagtatgcaaaggacactggctaccaagctaacatttttcatactttatttctttctatcttgttaagtctttttttttcctacttttttttttcaataacggagctattttattacagactcataaaaatgagtaatgtcaaaatgcaaactaagcttgatcttttagtctccaaactacgcaatttaatatattagctaacatatattttatatttttaatttaattacaaacccaatgttttaattgcctttaacatggtcaaaataaacgtccaggtgaaggcattaatactgtgagctgttgtcacgatggctggttttattgcaatgcactgcaagctttcaaattaacaaagtgtttgaggcatgtgttctactatcccagcttccactgacaaagtaaaagcatttcccaaaaccttagaagatataagaagagaaacatttgtcttaaatcagagagaaaagtgcagttggacaaactatcttacgaatgtcttatttctatgtgtttctaacccatctccaggggaatttgttttaacatttaacatacaagtttctttctctccccccaccttatctattgattgattgactgatctgtgtaatacatgctggccttgaattcacagccatcatcctgacttagccttcccagttctgggattatagccatgccagattacaaatgtctttattttgcaggtttgtatgaatgtgtgagcttatgtgtgagtgtgatatatatgcacatatatgtacaggtcctatgtgcatgggcagagaccagacaacatctggtccatcactctctgtattatttccttagagagtgtctttccctgcattgaaagctagactgttggttagcaaccttaatgatccctgtcccccattccccacattgctgggtttgcaggcaggcaattagctgtacctagctgtatttaaatgtgggtgttgcgatccatgtgcaggtcctcagttttgcacagaaagtggttgtacccactgaaccaactctctctcttttttaatcttcatacatattattttccataaatcttgtagtggtgaaaaaataactgagaaaaaacagtcacctaagatttcctaggttgtggaaatctaaaggaaactgtgtagtaataaactatttttatacgtaaaataaaataaaagccatatgacactgggcattaagtaagtctttgaaaaaaagtaagcacttgattgaataataatcctaccacttcactgtttatgaaatgtaacacctacttttttataaatgtggagtaaaagctgtttaataatgaaaattattatctgacactcctataagccatcagattcctgctagaaaggcagctaggattgtcttggttaaggaagagctgggtcatttaccagcgtcctcttaaaggaacgggatctctgagagcaatatgtgaattatcacctaactaatgacaggacaacatatacaccatcttcaaggggaaaagccatcccattagtctggatggggcttccatttatctcagccccaaagagaagaactagagccaaaacaatggcctctccctggccccttcaacttgcaaagaacatatggtttgaacaagctgtggacctggcgctggtggcactcactttgttctccaagccttactcactctcctctaggcattgaagaggacagagatttgaaccctgctccggtgtatcacaggatggaaaccttctgaacgttacagtttggtgacccatggttagaaagaggtagatggtggcaggtttggagaaggcgaggagttggtttttctaggagccccctggtgggtgcttctcagcacattctgagggaaggaccgtaaaactggccggtgtgcttgactgaggcttactctgttaactggctgagcaggaggaatagcagctatgccatttagggtgtcattttgaaggcaacacagatccatgaaaacaagacagaaaaaaaaaatcacttttgcctttattattttttaaatcctagccaggaaaggagagaggtagccgatattgagacaccagcataaatgccttctctgttacatatcagtcacttgaaatatgtattttgcttgtcggtcttggctcctttgcaagccattctcagtctctccccatatcatcctctgagccgtataaggagacacagctgcagatagaacagtagttctgtagtatgttcctggaggtaagctttaccagggggtgccactgaatcgttctagctccctgcagtaggaaacatggagatactctatcatagatatgcagggaacaaaggcctcattgcaagtataattttgcttcagaaaatccaagtcaaaggagcaggccctaagctttgcttgcagacttctggtgtgttgaacgcttcggtttgggcttggtaaaaaggcttcttcgttgattggtattccctactagattgtctctcagaccctgcatcagctttcccctaatcactgtgagactagtggggtttttcccaaccttgggtccaaaaggaggtttctgtctccaaaaatactgtaaaggcagggctaaacacacatcagtcgtcgcagcaaccctctccttcgaagccaagtctagaaagtagaaacagaggcataacaagtcaaccaaccttctgcgaatacaagagggaaatgcaaatgcagggtatcatgtggaccaagtccttctcagtccacctgtgagccaccatgcgtgagccaggaagagcaagactgcacacacagcttgttcctgcatggtacttgcaggctttcaggatgccttgtgtttcatttgcctgtggatagtggataccatagtcaaccccccccccccccgccactccctccccaggagattggggggggagtatttctattgggcagcattattctggagactctggtatttacttctgaggagcttatgatagtccaaattcattcgagcaagcaggaaacaatatggtcaaaacaacacagtggattcttttgcttgcttgtttgcttgcttgctttttaagcctaggtccctgtttagctacatagcacatctccatgccttgggatttcaaggcccattacaatgtcaagaaagcaccatagagaccaacgtaggtctctgagtgcttattttgccatggaaatgacaataacaaagcaattctgactaaaatatatagtcagcttaatttttaatgatatgagagtctctctctctctctctctctctctctctctctctctctctcttttacaacacacacacaaaaaacataatgtcaggaaaaggataagctaaccaaaggagtatgaaactttccaacacttctccacagtctagatttactgttactttgaccgggaccagtgtacccactctgcctgacaaactctaggtttcaggctagcttcaggaaactaatgatctctgccatttgccaagggtacaactggctctgaacccaggttctcagatcctggttccttgtcttggagtgggaatgtgagagtatccattcatgcagagtctggagaattagatcctgtctgtccttcactctgggcacatagcagacttagggggaaaaaaaaaagccttctctattttcttaagccttttcttcgaacttaactggccccattccaccgcaggcagacctttaaggagattgccctccctagccgtaaatctcccacacagacgagctttctggagaaaacccaagagaacagggccaatgacgttaagagtaaacggaagacctgtcaaataacgtacactatgaaagaagagcctgttcctagaacacagagtgagggcacttgtgtagcctctttccctctgggtactcagccctttgcctcctgtcaggaacttcaaactcagcctaggactcacagtcccctgtggccaactgtgacatcagcatccctggataattttctctgatgcatcagtctttattaagcaaaatagtacgatgtgctttgtgctcctgtctacaaacatttactaagttcctttgaagcttgaaacttctgtctgcaaatgtgagagtggattatgtttgcactgacatagagcttattcagtatcatgtatttttccttcatgaaaccaaaatttctatctttacagcacacattcgatgttagaccacagagtgtttgcttatactgtgtaataaattctcagttttatgccttatcatcaatgcagatttttttaaatgatttatttaatgtgagtatgctgttgatgtcttcacacacaccagaggagggcagcagaccctgaaacagatggttgtgagccaccatgtggttgctgggaattgaactcaggacctctggaagagcagtcagtgctcttaaccactgagccatctctctagccttcaatgcacattcttaatgaagatctgaacatacgtgaagcaaaaacaaaggatttatgctttggtaatttatgtgcttacttattgatttttgaggtatgtgtgtgtatgtgtgtgtgtgcgctcccgcacatgcgtgcaagtatgtatgcatgcatgtatgtatgttcacgtgagtgcaggtacatgtatgtggacatgaaggacacacatgtggagacccgagaacaaccttagctattcttccttaggcatcatacacattttgtttcaagacagggctcttcacaggtctggagctcaccaaatacagtagggtgggtggcctcacagggagctctaggggtccatcttctccaacgctgtgattacaagaatgaacccccatgcctggattttttttttatgtggattctaggagtcaaattgaagccctcagctttgtgaagcaagctttgctggttgatccatctccctagctttgcttcttgtttctgaaactgggtctcatgtcatccaggctggctttgagtactgtatagtgaactcctgatccccctgcctccactttccaagtgctaggcttgtgccactgtacctggtcttaaggattgatttggttgggttgattcaaagatcaggctcttcattcattcttaaatgtatttaagcaaccagaaaacagcactgactccacagtgtagctcccatttcgtgaaaatatcattcaactgataatcagacattaatacagaatgataaaataaaattaaacaacaaaatataaacaactaagcttcatcccagctgtgactcccaaccagctcagccatcctgatgccttcacaccacacaaccttaaactaaataacagagaaaggagagacattgtctgtgtttaagatatacaataatagttttaatatgaatctaaacattggattgagtttgttaatgtacctatcacgttatctagttactgcttttgtgatgaggaaatctaaaattgtgcatattgcttgtcatagtcagcaatgtgtgctataaatttcatgaacttatttcccataaggctttttaagcccaatcctatttcctggcccctgtaactaacacttcagactctcttcctgtaagttcatggttttgttttgttttgttttgttttgttttgttttgttttgttttagggtccacgtgcatgtgatgtcatacactgtttgtctgccttgttacactaagcatagcctacctcaggttcatacctcttacaacaaatgattctctctttaaaacctaagtagtatcctatgaggtaggcatatttccacctattgatagacacttaagatgagtgagtctgtgtggggactattgtggatatctctgtgacatgctgtttccattgcttgttgtccacacacccggaagtggatgatgaatgccatcctcttgtgccttgtttgtaagcactttagttaactatagctcagaattctatttctagatcaaaaagtacacaaatgctcttttactcctttctctgttatttagtttaaggttgtgtggtgtgaaggcatcaggatggctgagctgctttggagtcacagctgggatgaagcttagttgtttgtattttgttgtttaattttattttattattatgtattaatgtctgactatcagttgaatgatattttcgtgaactgagagctacactgtggagtcagtgctgctttctggtgggcttttggcatctctcagtgcatggtagagggggaatcacgtctgtgattcatagggcttgaattggaatcctcttcaaatttctttataaacacagggtttgtgtttcttgtgactccctttcctgaatcaaaatagatattaactaggagatactcgctctaaaattctttgcacagtgagtcatttaataaatattaactattgctacatattggtgatgactatttacaattattatcataatttaatcttatattctattgataaaagtattctagtggcatttgtgggcatttatttatttgtgcatgtgtacgagtgtgtgtgtgtgtgtgtggtgtatggtgtatgtacataattggtactatagattgagcacagaacttcatgtaagctgttgaatatatttcagacctttaaatacatttgttttggggcaggatcttgctaagttacccaggctgtccttgaaactcactctgtagttgcaagcaggcactgagtcttggttccttctgcctcagcttcctgagtagcaggggttgtacatgcatactatcaggtttgaactcttactttaaggaataacagtatctgggcttggtgaggcatggattttatcccaatatccagtaggcagaggcaggtggatctctatgagtacaaggctagccggagctacgtagcaagttccagccaagccagccttgcaagctgtgtttataagaaagatagaaagaaaagaaggagggagggagggagagagagaggagggaggaaggaaaaccaaaggaaaagaaacatcataaaggcccccgttactgaaactaacaagggccaaggtctctccattcccagtcttgaaacagttactgagggaatcgtacttgcaggagctgaatctggctgaacgttgtctttgagatggcccttctctgtatttaagtgctgtacgtaagaaggtttgcttttagagactctcagtctcttgtctatatttcaggctctttagttccgaaacagtgagagtggaaaatagtgtggtaaggaccacagaggtgagggtaaggtgaccaggtgtggaggatgagagcactgtcattttccttgtcaacacacgccactgagcctgtcctgcagatccccagtagagctggcccaggagccagcagggccttctctttcgagattgagaggtgggcctccctgtggccacaggcatggcttttacttcactctggtgaccaggataagggaacagacatagagcaccttccacatcagaagactagtgtaacactaacttccacactgacctgcagtggcttattctgtctgttctggaagtttctgcacgtgtttctaggtaccagactgcttgccacagaggtggtcttcatcattagcccattggaaatatcatctctctgctccttgtaccacaagctttataggtgccggtttggggacatggattgctcaggaataagctgacagttcaaatgaactattctcagtgaagtttatgtcaaggaaatgtgtgtgtaaaataactacattcatttaattaaaaaataaatttttttctgaagtgggtgtggcaatgctcattagaaatcccagcactaacaggctcaaggtgagaatattacaggttcaacatcagcctggtataccaaggaaaaactctatctttcaagataagtgaaatgaaatgattgaaataaataaaataggttgtgactggctagataaagaaataaacactgagatttaagacatccgttcttcaatttatgggtgctgggaaatattgcaaagagtcccaggtcctagcttcccactttcttccaagaagaatgctgcatgacttcttgggtttccctgcttctccaagacatgtcacactgacaccttgctcctgtatccctagtctagtggagctgacgttaccctagcaacagcacccacagggtaacattcccctgtaagtacagtggctggaacatgagtccgttgaaaagtttcgtagggctttttattactggatgatgcactcctgtgttatgtttgactcctggcctatccaaggcttacacatgaccgtacagatcacttgatgctcacctacaaatgttggatggcccagggttctctctcccagaagcctgttctgtagctggtcctttgcacggcattcctggctaacatctacaatgggaggtgtagagaaaggtgcagacccagagctgagaccccttttctacttagagcacatcctttgtgcctaaaaaggcaacgttgacactggttggtaaccaaggagactctcttttgtccaagggagatggacaatggttagcatccgggaagatgtgttttcaacccagaggctgggaaggaaatgtactgaagataaagatggagttactgtaattcccaatgggatttgcttgcagtgggatgtaccatttaatattgctcaaacgtggtcagagaactacgggagccttctaacactgcctctggtttgtcttgcagacatggagatgacttgattgtgaccccgtttgctcaggtaagccaacctgggagcatgtaggcttcttaaagatttacacagttgatgtgcagatcttattatgattctcaatacgactttattacatacacctatgtgactgccaattgtttggctcattcgagtaattaaaaggcagtgctggagaatgtaaccttagccctacagaggtgctttgtgtaaggctgttaggcccgaggagtgtctgtactttcaagtaacaagttatctaagggagatagtacgtatgcagcgggcccttatttccctaaactggaattagcaccagaaggagactatatcatggattaaattacatctagtataattagtacatgctctgggtttgaaattcaataatgccattcaacctgatatgttatttactcctctttcacatgtgttatttatacaaagatttaactgggcaacatgtttgcgttcttcatgcataagagaagaaactatttcaactccgtggcatagatgtgagatgataaaatgacttaaagtgttttggaatgtgtacagaatggttaaggaccaaatgttttgtggagtgaaatgggaccttgaataccttgggtagatctacttattagaacagagcctacagaatccatctgttattgaacatcttgggtaggtttacttatcagaacagagcctgcagaatccatctattattcaaatgtccaaatcataaccagatttaggtactagctaacatctaaactcttttattagtcttaagttttgaactttttgaacttctataaaagctcagaggcaccccagtccacaggaaaaaaaaatgtgccagctttaattagtttgtacgttttaccttagaatgattctgctctgtgctcaaatctttcagtgtgttctcttagacatgaaggaatcctctttagctgtccctcatgtccactgctcatctcttcctgttgaacatagcaacaatttagccagagtccttagggctgatgaacagaaatgagtaaaagctgtgcaggggagctggctcgccagtcagctgcttattttccactgccccactggttttgactgctttctaaaacctaaaactggtaacaagcgttcaaaccctagaaaccagcatccttgtcccctttggaggcaggagatatgtctgctctgaaaacaagaacaattgtgttgtctttcttgttccaaactatgacagttagtttcggggggtgggggtggggagggggaatacagtggctatttttaccacaacagagaattagtgctccgttaggaataggccatcaccaatatagttttaagctcctgtatatcccttcctgttccaccccaatagcagtaatcttgtggccaagttcattgattacatggggcaatggggaaagttcattgtctttcgtttgctttttattccacttttataaaacaaacaaatcaacaaacaaaacacaacttgtgtgtcaccagaatgaattacagctagcaaccttctacatagatccattcttactagaccgtgtcattatgaaatcacccagaactttctgacacagagaagcaatcacttcatgcattttaatagaagtataacttggaaagagatttgattttcaacagaggaaacgtttttttatcctgtaaataattttccactaattgttttggttttgtttttttcctgaagtgactcctaagagtctttgacctcacaaagacaaaccatagcctccgctccctgtatgtcacagcctgtgctgtactgccacccagtggcatcggctgtgcgtagcctggccaaaaaaaaaaaaataataataataataaatccaaaaacattttactcattcactttaactgtttaatgaagccagcataattttttttcctgccaacatcagtgaatcctattggctaagaaatgtttgaaagcaccccgaagaacatgagaattgtgtgtgtggatattcccatgctgtggcctaatccataaacaatattttcctggagtgttagcactgctcattgtcaagatttagaattttttcatcattcctttgtttgttactgtaagcgattacacacttactggaggtggctgaagagaaagcaatgcctttaactgttaagcctaagccgtctggaagaaaatgtagagatcctttaataataagctttaaagaggcaagagaattctggctgtagcttctaatgctagcctgagtctatgcagagagctgccctggaacacaagagaatctaggaacttgacccttcacccaggggctctgataaacccttttcctctttttcctcttcctctctcaaggcttgcttccctcccgggcgtgtcctgagggacatttctatgaagaatgtctcttagtcacccaggctcagggcaacatcatgtgtgacagattcatctgagaaatgtctatttacgcttctgccaggatcatatgtagcttacagagtggaagatatttttaacgtttaagtagagaaccatctttatcctgccacaaaccaaaacagagttctagtactcacatctgtgtgtcttcagtggcatttactacaacagagtacacaactgcgtatgcaaaactataggctaaaagtcagcaggccaaaggccggcagccagagcctgggggaggttgcttttctcagtctcatttggaaatgtggcatactatatatgcagtaatatctaaagcagaaataataatagtaaacgaaagttaagaaacagaatagtgtcaatgcttcaagtactgcttaactgtcccgcccccatccatccatctgtcggtctcattccatttgtctgtccgccgaaatagcaatcatttgattttatccagattatggaatacagtacaatttacttgacaacatttttgttgttgcttaaattcttcaatagccaaaagataggaattatttaaaataagtgtataaaatgtgcatactaaaccccccaaaattcagtttaatatcttaccagtaaaacaaagtttaaaaactgacctacagttgaggtatggtcgtaagcatctttagtcccagcaacccaggagtggggcaggcagatctctaaattggaggcgagtagagtctatatagtgaatgctaagccagccagggccatacagtgagccccatctcaaagcaaaacaactctttctacagaaaaaatttcattcataaattaatgtcttcctgaatgggctatttttttcaaatgattataaactatgaattacctgaaaaacttttcctacggaaatgaactattaaattactacttctaccacccaatgtccagacgctgttgggtaatcacaaaagtgttttgtattaaagatctcaaaattctgaggctaaaaaatcttcatctagaatagggagtagccggctgaggcaggagttgtatttaaatactttattgacatgtttgctcttcacatcttagaacacaaattaagttgtcgtgatttcacgactggatcgttaatttttttatttctgcatcattcagaatttcatgcctcatgaaagacactatggcctgacgtcagcagctagctatttggatacttcgtcacaggcggtgtgacctttcggagttgtgagtgataatgagccaggttttccagtgactggctggcttactcggaggttctatgaactccttcagggggactgctgaaggtcaccatggctgcagagcataaacagcttccttttgacttgcacaagttcccgtcagcttcgagaaaacaaacacccgagacacagagtgactttcgtctggaccactgtccgatgaagaaactcagggcacagttctcaaacccctaggtcaattagaaaacggaggattctgtatattgccactaataagcattcagcaaacttcctatgggccagataagtcaatggaagtttccataataaacacatggtcaccacatactttttgcttaagctatgtcattggcattaacctggagtagtttctttctgttaactgttcaagcaaccctaattaatgggcagatagcactctcttttacacagaaggtgtcataccaagtgtgtgcatctaactcatgacttataccaagacatgtgaagtctttgtttttgtttttgtttttcgagacagggtttctctgtatagccctggctgtcctggaactcactttgtaaaccaggctggcctcgaactcagaaatctgtctgcctctgcctcccaagtgacacgtgaagtctttttttttttttttttttcacatattaagaaggttttatttattttttctttttcttttttttttttttaatttttttccattttttattaggtatttaactcatttacatttccannnnnnnnnnnnnnnnnnnnnnnnnnnnnnnnnnnnnnnnnnnnnnnnnnnnnnnnnnnnnnnnnnnnnnnnnnnnnnnnnnnnnnnnnnnnnnnnnnnnnnnnnnnnnnnnnnnnnnnnnnnnnnnnnnnnnnnnnnnnnnnnnnnnnnnnnnnnnnnnnnnnnnnnnnnnnnnnnnnnnnnnnnnnnnnnnnnnnnnnnnnnnnnnnnnnnnnnnnnnnnnnnnnnnnnnnnnnnnnnnnnnnnnnnnnnnnnnnnnnnnnnnnnnnnnnnnnnnnnnnnnnnnnnnnnnnnnnnnnnnnnnnnnnnnnnnnnnnnnnnnnnnnnnnnnnnnnnnnnnnnnnnnnnnnnnnnnnnnnnnnnnnnnnnnnnnnnnnnnnnnnnnnnnnnnnnnnnnnnnnnnnnnnnnnnnnnnnnnnnnnnnnnnnnnnnnnnnnnnnnnnnnnnnnnnnnnnnnnnnnnnnnnnnnnnnnnnnnnnnnnnnnnnnnnnnnnnnnnnnnnnnnnnnnnnnnnnnnnnnnnnnnnnnnnnnnnnnnnnnnnnnnnnnnnnnnnnnnnnnnnnnnnnnnnnnnnnnnnnnnnnnnnnnnnnnnnnnnnnnnnnnnnnnnnnnnnnnnnnnnnnnnnnnnnnnnnnnnnnnnnnnnnnnnnnnnnnnnnnnnnnnnnnnnnnnnnnnnnnnnnnnnnnnnnnnnnnnnnnnnnnnnnnnnnnnnnnnnnnnnnnnnnnnnnnnnnnnnnnnnnnnnnnnnnnnnnnnnnnnnnnnnnnnnnnnnnnnnnnnnnnnnnnnnnnnnnnnnnnnnnnnnnnnnnnnnnnnnnnnnnnnnnnnnnnnnnnnnnnnnnnnnnnnnnnnnnnnnnnnnnnnnnnnnnnnnnnnnnnnnnnnnnnnnnnnnnnnnnnnnnnnnnnnnnnnnnnnnnnnnnnnnnnnnnnnnnnnnnnnnnnnnnnnnnnnatttccagagtggttgtacaagccctgcactccccaccaaccaatggaggagtgttccctctttctcccacatcccacgccaagcatctgctgtcacctgaaatttttgatcttaagccattctgactggtgtgaggtggaatctcagggttgttttgatttgcatttccctgatgattaaagatgttgaacattttttcaagtgcttctctgccattcggtattcctcaggtgagaattctttgttcagttctgagccccattttttaatggggttatttgattttctgaagtccaccttcttgagttctttatatatgttggatattagtcccctatctgatttaggataggtaaagatcctttcccaatctgttggtggtctttttgtcttattgacggtgtcttttgccttgcagaaactttggagtttcattaggtcccatttgtcgattctcgatcttacagcacaagccattgctgttctgttcaggaatttttcccctgtgcccatatcttcaaggcttttccccactttctcctctataagtttcagtgtctctggttttatgtgaagttccttgatccacttagatttgaccttagtacaaggagataagtatggatcgattcgcattcttctacacgataacaaccagttgtgccagcaccaattgttgaaaatgctgtctttcttccactggatggttttagctcccttgtcgaagatcaagtgaccataggtgtgtgggttcatttctgggtcttcaattctattccattggtctacttgtctgtctctataccagtaccatgcagtttttatcacaattgctctgtagtaaagctttaggtctggcatggtgattccgccagaagttcttttatccttgagaagactttttgctatcctaggttttttgttattccagacaaatttgcaaattgctccttccaattcgttgaagaattgagttggaattttgatggggattgcattgaatctgtagattgcttttggcaagatagccatttttacaatgttgatcctaccaatccatgagcatgggagatctttccatcttctgagatcttccttaatttctttcttcagagatttgaagtttttatcatacagatctttcacttccttagttagagtcacgccaagatattttatattatttgtgactattgagaagggtgttgtttccctaatttctttctcagcctgtttattctttgtatagagaaaggccattgacttgtttgagtttattttatatccagctacttcaccgaagctgtttatcaggtttaggagttctctggtagaatttttagggtcacttatatatactatcatatcatctgcaaaaagtgatattttgacttcctcttttccaatttgtatccccttgatctccttttgttgtcgaattgctctggctaatacttcaaatactatgttgaaaaggtagggagaaagtgggcagccttgtctagtccctgattttagtgggattgcttccagcttctctccatttactttgatgttggctactggtttgctgtagattgcttttatcatgtttaggtatgggccttgaattcctgatctttccaaaacttttatcataaatgggtgttggatcttgtcaaatgctttttctgcatctaacgagatgatcatgtggtttttgtctttgagtttttttatataatggattacattgatggattttcgtatattaaaccatccctgcatccctggaataaaacctacttggtcaggatggatgattgctttaatgtgttcttggattcggttagcgagaattttattgaggatttttgcatcgatattcataagagaaattggtctgaagttctctatctttgttggatctttctgtggtttaggtatcagagtaatagtggcttcataaaatgagttgggtagagtaccttctacttctattttgtgaaatagtttgtgcagaattggaattagatcttctttgaaggtctgatagaactctgcactaaacccatctggtcctgggctttttttggttgggagactattaataactgcttctatttctttaggtgatatgggactgtttagatggtcaacttgatccttattcaactttggtacctggtatctgtccagaaatttgtccatttcgtccaggttttccagttttgttgagtatagccttttgtagaaggatctgatggtgttttggatttcttcaggatctgttgttatgtctcccttttcatttctgattttgttaattaggattttgtccctgtgccctttagtgagtctagctaagggtttatctatcttgttgattttctcaaagaaccaactcctcgtttggttaattctttgaatagttcttcttgtttccacttggttgatttcacccctgagtttgattatttcctgccgtctactcctcttgggtgaatttgcttcctttttttctagggcttttagatgtgttgtcaagctgctagtatgtgctgtctcccgtttcttcttggaggcactcagagctatgagtttccctcttagaaatgctttcattgtgtcccataggtttgggtacgttgtggcttcattttcattaaactctaaaaagtctttaatttctttctttattcctttccttgaccaaggtatcattgagaagagtgttattcagtttccacgtgaaatgttggctttccattatttatgttgttattgaagatcagtcttaggccatggtggtctgacaggatacatgggacaatttcaatatttttgtatctattgaggcctgttttgtgaccaattatatggtcaattttggagaaggtcccgtgaggtgctgagaagaaggtatatccttttgttttaggataaaatgttctgtagatatctgtcaggtccatttgtttcataacttctgttagtttcactgtgtccctgtttagtttctgtttccacgatctgtcctttgaagaaagtggtgtgttgaagtctcccactattattgtgtgaggtgcaatgtatgctttgagctttactaaagtgtctctaatgaatgtggctgcccttgcatttggtgcgtagatattcagaattgagagttcctcttggaggattttacctttgatgagtatgaagtgtccctccttgtcttttttgataactttgggttggaagtcgattttatccgatattaaaatggctactccagcttgtttcttcagtccatttgcttggaaaattgttttccagcctttcactctgaggtagtgtctgtctttttccctgagatgggtttcctgtaagcagcagaatgttgggtcctgtttgtgtagccagtctgttagtctatgtctttttattggggaattgagtccattgatattaagagatagtaaggaaaagtaattgttgctcccttttatttttgttgttagagttggcattctgatcttgtggctgtcttctttttggtttgttgaatgattactttctttggttgttctagggcgtgatttccgtccttgtattgcttcttttctgttattatcctttgaagggctggattcgtggaaagatattgtgtgaatttggttttgtcatggaatactttggtttctccatctatggtaattgagagtttggccgggtatagtagcctgggctggcatttgtgttctcttagtgtctgtataacatctgtccaggctcttctggctttcatagtctctggagaaaagtctggtgtaattctgataggccttcctttatatgttacttgacctttctcccttactgcttttaatattctatctttatttagtgcatttgttgttctgattattatgtgtcgggaggaatttcttttctggtccagtctatttggagttctgtaggcttcttgtatgatcatgggcatctctttttttatgtttgggaagttttcttctattattttgttgaagatattagctggccctttaagttgaaaatcttcattctcatcaattcctattatccgtaggtttggtcttctcattgtgtcctggattacctggatgttttgagttaggatccttttgcattttgtattttctttgactgttgtgtcgatgttctctatggaatcttctgcacctgagattctctcttccatttcttgtattctgttgctgatgctcgcatctatggttccagatctctttcctagggtttctatctccagcgttgcctcgctttgggttttctttattgtgtctacttccccttttagttctagtatggttttgttcatttccatcacctgtttggatgtgttttcctgtttttctttaatgatttctacctgtttggctgtgttttcctgcttttctttaagggcctgtaactctttagcagtgctctcctgtaattctttaagtgacttatgaaagtccttcttgatgtcctctatcatcatcatgagaaatgtttttaaatctgggtctagattttcggttgtgttggggtgcccaggactaggtggggtgggagtgctgcgttctgatgatggtgagtggtcttgatttctgttagtaggattcttacgtttgcctttcgccatctggtaatctctgaagctagctgttttagttgtcactgttaagagcttgttcttcagatgactctgttagcctctatgagcagacctggagggtagcactctccttagtttcagtgggcagagtattctctgcaggcaagctctcttcttgcaaggcaggtacccagatatctggtgttcgaaccagactcctggcagaagttgtgttccactcactagaggtcttaggatcacgtgtggaatcctgtgtgggcccttgcgggtgtcaggcgactcagctggcaaggtaacccggggctcgagtggagcggaaggggtttgtgccccagatcaagcccgggtagcctgcttccctatgtaccgcagtctcaagttccccgcgattggattggggcaggcgctgtgttccactcaccagaggtcttagggtcccgtggggagtcccgtgtgggcccttgcgggtgttgggcaagactctgctggcaaggtagcccggggctcgagtcgagcggaagggacttgtgccccagatcaggcccgggtagcctgcttccctatgtaccgcagtctcaagttccgcgagattggattggggcaggcgctgtgttccactcaccagaggtcttaggatcccgtggggagtcccgtgtgggcccttgcgggtgtcaggcgactcagctggcaaggtagcccggggctcgagtggagcggaaggggtttgtgccccagatcaagcccgggtagcctgcttccctatgtaccgcagtctcaagttccccccgattggattggggcaggcgctgtgttccactcgccagaggtcttagggtcccgtggggagtcccgtgtgggcccttgcgggtgttgggcaagactctgctggcaaggtagcccggggctcgagtctcgagtcgagcggaagggacttgtcgacacgtgaagtcttaactcacgacatatgaatccccaacaggcactgaggtcttattgacatatctatttttactgtagagtccacccctgaagaaaatgacctgttctaggaagactaaggtctagggtcagcaggctcctgtattctctccatggcttgctcccatcccataggcatcttttatttctgatttgaattagaataaagatggagctaccagagttgggagcatctactccctggcacatgcacatacatgcagatctagtgcttccatatgttcatttcttcaaagccattttagtgaaccctttcttcatgctggacagcatacagaacacacagcactcatgttctccatgatcagcgcccttctggggacttcttatattccacttgtgcacaatctccccagaggcaaagaatatctgtggactaactagctagcatagccctatgcaaagatgaaaaaaaaataactgaagatttacttagcctaatgacctgagatcagaggaatcttgatgaagttttcaaagggaattagagactagttttatttattttttttaaatcactattctgattcatggtcttttgtattatagtatttcataattgcatgaaatgagaccacgtttttgcatgcgcatagctgggaacattgtattgagaactaaaggactggggaataatgctgctactgttaccagaaacaaagtcagtgagaggggtttctacaaaatgctgggagtttaacctccctgatttcataaccaggattaaaaattttactaagttctggaagattccataagggtatatgaaactgagttgaagcaccatgatggtttttctttaaaagacatgtttagttgcacccaaccagcctcagatcaagaatgctaagcaatctctcacttttttttttggtcataggtcttggctagcctgcgaaccgtacggaacaactttgctgcgttaacgaatttgcaagaccgagcacccagcaagtaagctcctctccctcttgctctcttttggctgaacctttagtatcttctcaacttgacctgcactcaggacagcacattagacaccgcagaatcacctcccttgtccggccgtgtgccctacatcatactttgcctacttcattttctgtaatgactttgtagtgactcgaggcttgaaatatcgaagcagaaaaggcaaatgcagtgatgccccctctgtagaaaccatctggaagctcctctgtcgctctcgctcgcaggatcatctcaggttctgcttgccttgggaactgcccagggcttgtactttgtttgcatctgtattcccagttcccatcctaacacggagttgcaaccctgaagatgctgagactagtcaagggtgtgctttgaggaatccattccttgccagcggccatttcggtagagcctggccagctggaccatgccatcctgacctccgcagcttctttggcttttggaagaaacacatttcctttaagtttccttcagacactgctacctaggtagtggcatttaaattggtgacagttgatctgatcagtgtgtcagtatcacaatgatgattgtgtctctgaagagatgtccattctatcccaagctacttcataactgtaactttgctactgttatcaattgtaaaaaaaaaaaaaaatctttgaagagagggttgccagaggggtcgcgacccccgggttgagaactgctgctctagagggctcagcatttgcctgatgtgctctcctaacacctcgagaacatttccaagtttaccatctcactttgaggagggtctacgcctttttattttctttaggaaaggatttgatggagaatatgtcctaagattgtccctaggtggacaacctgagctaatacccactgttagtttctaccacctcactttcttgccatcaagatctacatacatgcatacatacatacatacatacatacatacacacgaacatttttcatatatatatatatgaaatatctacatatattcattcccagaagtgaggcgtgtgtggctcattctttactaatgatataccaacatccttgtggatctaatggtcaataatatgtattattgttactctttgggttactacatgtaagccatagaactgattctaggaaaagttaaataggaacaagacagtgattttgttctctacaactatgtaaaaatataacgtcttcatttgctaataccatgtgaagagactactttctaaatttttacagaacaaggatgaaaaattcttatcaacatataagttatttgaataaactctagactacagcaatgccaccctaaaagtgctctgtcacatgtgcataataaaccttcaccaagaacataaccatgctacctagactagaacagtcatctaaaacaactcgtgtttaatgaagtgtttattaagttctcatttccactttctgttttacactaaaaatataaaataattcagacataaatcttggtacattttcagacatacacaaaatttaagtgcaaaacacgcaacaataaatgtaagcattgtggtgcagctggaaggttgagtggaacctgtcaaagcagacataatgttagatggctttccccaggtatcctgaagctcaggtaggagacatttttccagcaagataaatgtaaagggctagccacaatctgcacctatgtgcgactgtccagatctctctgtctctctgtctctctctccttctctctctctctctctcacacacacatacacattcctaatagttaagacagcagagcatagagtgtaatgttagtgtcacactgtactagttcaaacctcagcttcaataccctaaaatgttcaacttctcaaaacttattacacacacatacatacacacacacacacacaatcagttcacttgccttgaagtttgtcataaggattaagtgagatttaaatacacagcacaggacctggccacagcaagtccttagtaagggctacccactagaaaaagaatgtgtgtgcatgcacacacaccaaaaagaccttaggggttttgcagacatcttgcaacataagtgtttcttgaaggatttttaaagatctctggcctttgaaggccaccaggtattggcgataaccttaaaaacttctacttccaactcgtttaatggatgtcttaaatgatttttcttttcaactcaatttagttagcactgacccaatgaatactataccaattgtgttggctttaataggggatgcagcctactggcacagcaggcatattcctaaagatgtttacaatcatctcgtgggagctgtcaaacaactaaaaagcagtgaagaataacaaagggcatctcttcaagtgcaatggctttataggacactgcagtttagacatgctattagtagactcctctggcagatatgccagacatgcttcataatgaacaaagtggaaaggaaaattgtttacatcctgtgtctatttacacggtagtttagaaggaatcagtcactcctggcaatgtacaagaaatcaagagactatgcgtcagaaatcagtctctaataccgaaccagggaaaactattataccttgagtaaatgttaactctcagaaagtctattttgttctgcataccttaactgagttgaacacagccagacaataagaatgtcctctcccgacacatgcctgtgaagtttgtccttttaatccagtgtcctcccctttcccgggatccagccatgagatttaagttgtcttgttttcttttctttctcccccatttccaatctggagtctgagctacagtgaaggggcatccaagaaccttactggctagtctgagtgacgtcattgagttcatgtcacagctttaaaataattctttcaattagaatggcagacggaaaacaacttaggttactgaagtcaaaaagcaccgacatttaccgctttgtgttttctttctttgccagaagatcacccatgtgcaaccaaccatccatcaacaaagccaccatcacaggtaagagacccgtgggagcgtcttcgtctcctgtctgtttatgaagccttagagctgtgctctgttcttagcacccaggttatgctatggttctaaaactttaaagaaatgaagttctcactgtctctttcttcgttgtcactggtctcatacattggctctcaaccctcctaacaatgcttccctttaatacagtccctcatgtggtggtaccccccccaaccataatattattttcactgctgcttcctaactgtaatttttgctacggttatgaatcgtgttataaatatttgtgttttctgatgatctaaggtgaccctctaaaagggccattcaaccttcaaaggggtcaccatccacaggttgagaaatgctgtctcctgtgatttgcgcttctgcgattccttgggaaatattttctggtgtaccatgattttacagaggtgactttgtgcttgggtttggtttaacatcgttgtagacacttgtatcagcaaggttcattgctcatacggtattatctttgttgttgtgttagccttctccaccttgtctgaatgcaacatagcttagtttaaaggggaatggcaaaaccaaacatactggcatgcacttacagacctcatacttggaggactaagggagaaggatggcaagttcaagaccagcctgggctactacaaaggaagtctgaggttatcccaagcattgtaatgagaactgtctcaaaaacaaacaaacaaacaaacaaaaccaggaaaaagaagaattggggctagcagtaaggttcaacaggtaaaggtgattgtttctaagcctaaacctgagttcaaacccccagtacccatttggtggaaatagaaccaactctcataagttgacttctgacttccacatgtataaatgaatatatatattcatttagaactagacccagggcccaggaaatgaagttcataaagtgttgtcacacaagcagaaggactccagtatttgcataaaactctgggtgtggcacggaacacctatgaccttagtgcctgagcagtgcctaaaatagggtgctattagggcttactggcctgccagcctagctcagtcaggaagcccagggtcccagtgagggagaccgtatctaaagctatcagatggagaatagttaacagagataccagacattgatgtctggtgtcacatgcatatatatctacacactcacatgcatgcttatactaacactcacacacacacaggaaaagttcccacagatattggggcgaaaatacagcggaagtaaagaacataaaaagaaaacgatccctatcctattagtccgtgttcgataggagagttgacctcaactgaacccaagccagaggatgatctcattttgctgaacttgcgaccaaattgagctcatttaattgtttcttgaaacctcaattgattcattaaaataattgcctggaaagaaaacctatgatttctaaaattactaccagaagaaaattagcacattctccaagttagaccaattttttggttcaagtatcttctttaaacccctgtccataatctgaggaaagggggggaggaggaggaggaagaggaggaagaggaggaaggaggaggaaggaggaggaggaggaaggatgagaaggaagagggggaggaggaggacgaggaggaggaggacgaggaggaggaagaggaagaggaggcccttacatgattttcagtgaatatactttatggaaaaatgagcatgtattgaccaatgtgctggctggctctatctgtggtcaccacattgcagatgattctgaaaaaaacggatgttttcttccttgagaattccatcaagtgtgtgtgggggggtcacattttaataactattaagctattggttctctctgtctcatctgcttatgatgatgtcacaaggtcctggcttattatgtgtacagtccaccactttgggtcttgattgtcatcaaaagaataatagtagaaattcctccctactaaaatgaattctccaaggaacaaattgtttgttgttgttttgttttgttttgttttgttttgtttgttttgtttcatttcgctttatttgtttctttgttttctgttcttgttgttttggtttgtttagaaactcagattcagtataaagggcgaaacaaagatggacgggtggaatgggtccctcttttctgtgctacttcctgggggtgctgagggcatattttgtgagcacatgcatggagttcttagtgagcgcaactccatggaacccgagacccttgctcagacacacagtgcagccctctggagaggagcttcccccacccccttcgtgcacaataggcaaatcatagtggggggggggcgagtagaaggcaatgttcttttcttctctgatgcttttgccttgagggtacttgtatctaccttgtaggtagggcgaccatctcccccccccccaaaaaaaaaacaatgtaggatactggtggaatgattcgtgaccaacaagcaatcttggtttctccgtggtcagtgtacctcccctcccccacagcactttgccggtgcccaaaccaaactcaagggagagtctattcactcaaggtcacagaactgaagcagtccctgggttgtctctgcaatttttacataacactgagaggaaatcattatctgctggaattaggcaattatggtgaagaaggcctcatttgtacctcttactagtttgtgacctggggcttatctagaatggcaaactaattagctgtcattaactgcttagagcagctgcgttgttacagaccactgtagacaacacacacacacacacacacacacacacacacacacacacacacacacaccactgacgaaagtctcatttacttcccaagctttgcaaaccgaggtgggaacatgggcagggaaaaggcctcttttctcagtaatctagaaaaacaagtacgcttgaaaaacctaaaagctaccaacaagaacagtgatgatcctggtgttgagacttgatacttgactgtctgagatttgagatacccagaaaagatgacacatcgcttggggctcatctatccttacgatcacgtcctgggaggggtggaaaggagtttttgtctatttgtttgttttgttttgttgcaaagccagtggggacactttcagataaaacctgcaagggtgaaccccaattctctccagctttaatttctaactagagaacagagatatgagtacctgccactcagaaccgttgcaagaatgcaagcagataagttacagaaagggtaaaggccggtcatcaggtcataagtggctccccaagtattccgttgggcagttctgtcccctcgcttcccatttgttcctaacccctgttttggcacgggagagtggaggttacagaggattgcggtggccttctgtcatttctcactccgaacgtctcgggatgcttttgttccaggcggtaacacccacacattttcaatgcttcctgtatcacgtataacctaggtccggagccagttactcgtagcagaagcaaagaggatgtggggccagtagagggcagcagagaggcaaaaatgcccaagctctgagagtgtggggaccaagtcatgatgacgggacagaaagtacttttgaacgttcctttcattttaaaccaaggttaagaaagttaactgcagtgcagccacctctcagaaccttgtcatcctcaatatcacctgcactacgcttcttaagtttactattatcatcttctttatgtaatcatattcaattgagaattttcatgcagcaacaaacctcaaaggaaatctatttggatgtctttattggaaatgtgagaaaaaccaaggctgctgagagaaaacactactttgtggctgaactgggaataactcctcatccttgctctgagcccaagccttaaaccctgacccccaaccataaacaagcaaacactagatagaatagtaagtttaaagaaatgtatgcttacaagacaccacagggaatatgaaagaatgttaatttctgagtagcaggtagctttagactattatggacttaaaaatcacaaaaatgtcttgggccaatatctcactggaaatgccttcatatttagagctatttgaataacatctagtagtgattctagaggtagggggatagccagcctaaaacaatggcttttgcttttgtctctaaggtcttatatcaaaacaacacactccctctgtccctgtagaggggacaggaaaagtgacaggcagaaagccatgtacacagagttctggtccagaaaaaacactggccattccacttagaactattttaacctggatgctcttgatcccatcaagaaaagaatgtttactctgaatagaattctgtcagtcaggaagcccgaggattaaaagtgaagtatccaaatgctagttagtcaaaacacagcgggaagaaactcggtcttcagctgtcattgttctgaaggataaagcaaaactgaaggtctacttgacaagttgttagcacaaccaacccaaggtatttaagagaacaatggtttctcttaggatgtgggccatttgcttaagcactttcaccttattaaagaaaaggagccaagttgtagggtttttttgtttttttgtgtgatagtaatgatactagtaattatttagatcttttttagtctctgtgtcccatgcatatacgtgataaaaagagtaggatatattatttattaaaatatactatattatatattcacatgtatttaaaataatatatggtggggcttccttcaagaaatgagatccctgtgtaagagcgtcttgggtgctgaggagacaatgaactgcaaagtgcataaggatcacagcagagcgagccatcttcagagaaaccccgccccctcatcactggctttctggtatcaccttttaaattgtcctgtagtaagagaaaatctagtgccaagggacctgtcactccagaggagtgctcagtgggctctttctgggtgtgcctgaaatgttgctgatgcttcatgcttaataactttaatgaaaatttaataaagattacacatgctcacgattatagacaggctgtttggtggcctttgcttatacatttgatatatatataatatacaattatatatatatatatatatatatatatatataatgaatgcctaggtattctgacttttttttaaagctaaaacagttaatttatgcaccctgcctccctaataaaaagactcctagtgaaaatgagatttgtctgacgacatgtatgcatggctcttttattagctgaagtatttaatagactagtaagaagccattttcttccttgcttgcttcatagcttgcattgctgtctcaggcttttgtttagacaattgagttataaacacacacacacacacacacactacctgactttttcaccaggaattggtagaacctgtacttgtacgtggaattacaacagcagagacaaaggacatgccataatcaattcaactgtgattcgtctgagtctggtttggctactttgttagttgaaagaatagaatgctgctgaaggttcctttagctggcaaagccaaaggtcaagtacagccctgttcagttctgagcttaagttagtggtgagcacaacgcttcgtctccagaatgtattcgttctatgttgggattgttcatctggtcaatggtcgttttcactttctagcccttgtgaatcgtggggaacacagtaaagcgtaactgctcgtttcaaagaactcacaaggcaggagggaaagcacaatgagtgagactgagatgcagacagttctgcctggggaactctgggcgtggggtgagggctctggtttgggggaggggcagcaatcaacatatgtgagcccctgggcttgctattagcacttctaatgcatatggtggctgggcctggctttcattgctgcactcagaaagaggcaggtggatctccacaaagacaactttgtctacactgggagagtaccagcctagtgagacttggtctaaaaagaaaaaagaaaaagaaatgacgacaacaaaacaggaaagaatatggtgttctctgtaggggcgttaggggaacattacctgaaaccagaaatcaacaagactgagatatggaagcatgaccgggtaataggagacagaaaaggacagttcaaagtgtgttagcaactcagcttgtggctgcaaaggtagatcggatctgcatgaccttattggagctccatataagcagcattggtctcattgtgtgggacatagaaaatcctcagtaagttctttggttggtcttgtgttgctgggattgaaaccagagccttctgcaagctggccatgagctttaccactgagctgaaacctcacccccaatgccatcagttgtttttgttgttgttgttggtggtggtggtggtggtttttttccttagatgtttgtgtggttctgaaggccaaactcggggctatcaatcggttttcaatatgggaacatacatgataatgttcttgagaatgactgctggaaacggtgtgggccatgtacatgagaatgtcccttaacctgtggtggtgggtgggcaacagagatgctgcaatagatcatagcggtgttcagaggaagccatttaaaagaacgaagtcacatagaaggaaacattgtaagtatgtagatgttataaagcatcccaaacattaaataacattgaaattctcattagaaaaaggttttctttttgtttgtttgtttgtatttatttttttaacaatttatgtgaaaaagataaaagtatagaaacacttttttgttgttgctgttttttttttttggttttgttttgttttgtttttctgagatagggtttctctgtgtagccctggctgtcctggaacaaactctgtagaccaggctgtcctagaactcagaaatcctcctgcctctgccttccaagtgctgggattaaagtggtgtgccaccactgcccagcagaaaaactctttgattccaaatggcattttatacacatgtatgtgattgaaggtattgttggatgttaataagggactgctaggcacagatagaactccacaacacacaatctaatgacaaagttcattgtttctcgggcctcagatagcagtttctccttacctagcaatgatccttcagcgatgctgcccattttgttcagtatcagaatgctatgagcaggcattatctgtattttcccatcctatttccggtggatggaagccctctgctggttattgatcccatagcaagaccatgctctttttcaactgagtggggaaagctacatactatggtaacatataggttttcaatgcctacttctcattgtatcattgtgttacaaaaaacagtcaaaattcccctatgggcctaagtcaaggaattcaccacaattattgttgggcatttctgaaccaaatccttgagattgtgttcagagtcttatgaccaacaaaaagtcacagatagaacacttgatattccaaacagtaggtgagagtactgcccaggtacagtattaccattgtaactgataagtagttgccaattcttgtctttttggaaaatgcatagaatggcacccctcctcccccacatcacagtggaatctatacactagataatatgtatgcagtgctagggggtcagagatacaagttgacattattatctgacaacttcgtcaccatgttcgtcatcctcagggccgtcatttctgatatctctcaaaatatatacaaggttttacttagcccagcttgctccagtttggagagagaatggagcgccatcctgtgcatgtttgtgtctgaggtaggagtgaatttgggaaatattatgtttagtaactgtattcgtttttgtctccacaaacactgtacaaagacttcttttcaaaaacccaaaggaaaagaataacaaaagctgcattcctcagccactccttccactctctaagtgtttcccacccattggaaaattgagaacttttctaagcatactgggaaatgcaaagattgtgtgaggcaaaagacttaaggttcctctggagctaatttcccaagtcagactgtttaaacgttaccctgagttacttagctctcaatagagggacagtttcttcacggttccctgtccttctagctcaagaattgctttaatatcaataagaatacataatcaatactgacattgagaaatgttaacatttgccaattaaacactgtatttatgcgacttaatccccacctcaaggaggcagaggcaggtaggtctctgtgagttcaacattaaccttgtctacatagtgacttccaggccagccagagctacagagtaaggtctcagaggaaacaaaagcaaaacaacagtgtagcgatgcaaagaggtctacactgttaggagagtgggctgagaagtaaaagatgcaggggcatttctgagaagtccgagagcggtggtactttgggctgtcttgcttccagctttcagaaccactcatttttaagcctttgaaagaacactatctccactcatcaggttgaggccagaaaatctacatcttttttttctccttaatagtttgtatgaagaccttcattgttctcttggctaccatatttccagacatctctcccaactctccatccctcaagtaccctacaccagacatttctgatgcccaagcatccagtgcccttttagtctgtctttatttctgtagtttgggttagaacatgggcagctcaagggaagggtttccagtccactgcattgtcgtgggtgagaaagcatggctgtttaaggcatctaccttctcatgagcccatctctgttatttgcatatttcaccctgacttatcatgtggaaactgtcatttctgtgtcatcctgggcttgtggctttattcatttagtccctggtctgggcaggtctgcttaagctctgagtattcatgcaagcataaagtacctttcctgggccttagaaacactatcctagagctttgggggacataaaaagccaaaatgtgtcctttttactgagtgacaggaagcattaagtcatgttttaaaaaagaaaagaacgtttatacatgaatgaatccatgagcaaacgaaatcaggcagggaggacagattggaacaggatgaaggccccctcgacagagttacttacctggaagagcagaaatggtttgggagaatgataaaggaagttggggagcccaagaaagaagtgtgggagaaagaaaaagaaaaaatggttccaaagtagccaagaaaggaagtaagaaaggtttggtcatggagctcgctgtagtatgaagtcactggctgctaacttgctgttatctggcaaaattgcctatatagaaaaagaactatatttccttcattccttaaattgtctattaagtaacaaaactatatttccttccttccttctttcctttcttccttcctgcctttctcccttccttctttccttccattcttccttcagtgtcagaacttgaacacagagccctgcacctgtgggtcaagtgctttagagctgatctccagccctcgccttcctgacattactggtgttttacagttgaaggcagaatgtttgtggcctgtgctctttgtttactttcaagtgtaggaatcaaagcaagatgtagtatgcatccctatgatctttgctcaatagcaatctaagtgggtggttgtttaataagttgttcttatttaaaattttaataaggtatacaagataatagagagggaattatggttattcaaaacacccttcattttctaagaaaatcatttaagggaatcctgggatatgagttaggttttaaagttcatttgaaggttcatatcttgagcttctggatatgaatatctacatactggcacacatttaagagctaagagctcttagtagcagcctcgtgtacattcaggcaggtataagttccccacaaagaaagaatgagaaggacaatttaaggttgtccagtatatcaaatttccatctctgagacaaaatacatgggataatcacctttaaagtaaagacaaaaattgtttgtttttgtttttaactccatttcagagatttttatcctatgggacttgactctctaactctgatcctatagcattatggcatataacgatgggaacacatggaagagggggtcttctccagttcgtcatgtccaactgcaggagacagaaaggagagaatcccatatcccttacaatgggatagcctctgtgatataactcccttcaactaagccccatttgtaatggattctagatatggatcaaatatatcatatggccttctagggctattcatgatccaagctacgtcatctagaaaaaagtatcctggtccattggtgggatgagatgggtttcaatctgattggccaatggaagctcactgtagagtactacatatgttacctacctacagagtaagttatcatgaagcatagtgtccatcagcagactgggaggacttggatgtcctcaccgctgcttccccagagccactgttacgtctcactgtatgtttccagtttgccagcacagttctcaccccaacaaagtcatgtaagtcccaccctgcgtccgtccatcatctcatccttcatcgtcgtctagagttcccacactctaagcacagcaatttcccttacctggacatagtcatgctcctcttcatcacactcaacagtaaccagaccatcgccaactgctaggtctgtcgtacccacaagcatcatcacaccatagtacccatggtctgcttagaagagatgttaagataagtcatttgacttcagcgaatgactttcggtgaatcctggctgtgtccttgctaaccatttgactttggggaagattttgttcctggccattgtttcttatccataatttgagggtcagagcagtgcatcctggaatgccaagcaagcattgaaggaacttcatatcagggggaccaaagaagattaacagtaatgaatatgtaacctttgaacgtactaggacagttcttccagtcaagtccagaagaaatggaagggcaaatgaggaaaaagtgaagtgaagacaagagctgtgtttctcttaagtcatttcccttgttgcctgggttcctaagtgaatagccatagccaagactacaaaaagagagagagagagagagagagagagagaaagaaaggagggagggagggagggagggagggagggagggaaagaaagagagagagagaaagaaagagagagaaagaaagagagagaaagaaagaaagaaagaaggaaagaaagaaagaaaaagaatgagagaaagagagaaagagagagaaagggagaggaaagaaagagggtgcctgtttctttggccagttctttctacatgtttaaattcctaattgtgcacacaatcttagtcactccattttcatgtgcaagcaattaagactcattagcagccctcccccatggaaggttttgttccccatctgccacgaatcagatccctcaggaacaagtttgactttgaaacaatgtgaaagtgctgtgtattttgttcagattgtatttatataacattttaaatggtgtaagtggacattcacaatcagatcagcaactggaccaaacaagacatcaaagaaaccagtgaaatggggcaaaaaatgagtttttttggttttgttttgtttttttgtttgcttttttccccaactaatataataggaaggagtaaaataagaaccagtatttggtaaacgttcctcagacacatttcactcataactatttattttatgacatgagagtgtactttacttcttactctgaatattagttatttatattcctagctcataggaagaagccagaaggagaaagacagagtacacatttgtttgtttgtttgtgaaatagaatacaaagctagaggtttggatgctaagaatctcagaagaactcaacagttttgtatgacacactgctcattaaaaaaaaaaaaaaaaatcaaatcaggacagagaagtgccaggtccataagcaaagtgctttccacataagcacaaagagccgcgttggcatccctggccgccatgcaaaggctgtgcactgtggtccatggctgtaatcccagcatggagaaggtggagacaggaaggtccctagggcttgtgaggcagtctacccacactgatgagctccaggcttagcaagagactctgtctcaacacagcaaagtggagctggttgtggtagcacatgcctttaatcccagcacttgggaggcagagtttgaggccagcctggtccacaaagcagatgcccgcacagccagagctacacagagaaaccctgtcttgaaaacaaaacacaataaaacaaaaccaaaaatccaaggtagaaaatgaagaagactagacatttactccctctctctctctcacaggtatacatatctatgcacacatgcacatatgcacacacccatctgagcatatatatcttacatgctacatacatatcaaacagctatttatcatcaatcactgcaaccagactccatttctactttttttttccctctgatttttcttaacattagaacaagaaatagaagctgatgtctggtaaaacaaacaaacaaacaaacaaacaaacaaaaaaaaaccctaagttcttgacccaaataaatgtatgtaaatcaatcactctaatgttcaacaagactaaaaagagaaactgcctgacttttcttggagctgtggaaaataaaatgtcccagatgagacatgtgctgtgcctgcgtgaatatagtatacgatgttccccttccccgcttgggcagaagcttgaaacacaccagtaaccctcatacggtaaacctccatctatgtatcttgggttattttgtctatcagcctcttaaggatttaataaggggaaatgttttggaatcactggatgaaaggctttgcaaaagttcaaagtattgttgttattttgggcagtcacacctgcaggtttaacatcctttgtgcaagccaaagtctggtcctctctctcatccagccttcaaagaagagctggctggggcatgtgacagattctcttgggaaagctaggagagccaccaccacccaccagtcgtgtttgtacataaacagcaaatggcacccaagaagagtaacagcctccacatgggtgaatctgaagccaagcagaagatctagctgaagctgaacacagaagatctggcagacaaggaggggtgaagggaaggggacacagacatgtatgatattgtgctttgtacctacagaggccatgctcattcaacaggaacatctacagacgagaagcacacaggtacactatgtctggcatcaaccaagttccttcctttgtgtcattagtggtcactgggggtgtccacacacttgtctgttgatgagtaacctccctgggatttaaaaaacaaagcaaaacaacaacacaattcagagataaaggaagacaaagcagagggacagactagctttaaaggtgaaaccagtgtccagggaaacaggccagacagttggaatatagaaagatagttatggaacataactgtgtagtgactcttgattgtatgatgctaatgactagatataaactacttctgagactgtgttaaattttgcaatccttgctaatacatgcagggtaaaaacaaaaggtagagttctggattccaatatcaagtacaatactagtttacctcagtgaccagatgacctgcactttatttaagagaaagtgttccacacatcaaatgttgtagaaaattcagcctcgtgactattttgagacagggtctctctctctctctctctctctctctctctctctctctctccctctccctctccctctccctctccctctccctctccctctccctctctctctctctctctctctctctctctctctctctctctctctcgtccacactatcctggtgctcactgtttggcccaggctggcctagaactcacagtaatcctcctacctcagtcttacaagtgctgaatttacaagtgtagtcacagtccttgggtaagactcataatgtatgtgtaattctttagactgaaaacatttaagaagtgctctgcttatctttaacccctgaaagaggtgcaagagctgtaaggtgctcacccagatggctttggtcatcccgagcctctgctttcactgaatctgtcatccgcagaggtccctaagagcaaatggtccatgagggatgactttgcctatatcattaaaaaagattgatgggtggggaaatggttcaacagtagagggcttgcttattatatacacacactttgggctagatccctagaaacacacacacacagagcctggtacatctatcactgtcatgttttctctgccaattttcatgaccaaaacaaaacaccacagattgggtaatttataaagaatgaaaaaattattttcacataattcgacagactagaaagtctaagttcaaggtactagctttagataaaagccttttaattgcatcctaacatggtgggaaatggaaaggccaataggataaaagtctgcccccttcactcttcttaacagactgccttaccccattcccacaggatagccttcatggtctcatgaccatttcaaaacccttcacctcaatacttcttgttggttggttggttttggtgtttggtgtttggttttttgagacagggtttgtctgtgtagccctcactgtcctggaactcactctgcagaccaagctggtcttgaactcaagagatccacttgcctctgcctcctgagtgctgggattaaagctgtgtgccaccatacctggactggaataaattcttcacaaaaaccaaatggtggttattataaagttttaaaagcagtccctgtactgatccttattatattcctcccccccccccgttnnnnnnnnnnnnnnnnnnnnctcctcctcctcctcctcctcctcctcctcctcctcctcttcttctggtttgtcccaagacaagttttctcagtgtaacagtcctagctgtcttgggacttactgtagcccaggctagcctctaacttacaaagatctgcctacctctgcctcccaagtactgggattaaagttgtgtgccaccactatcagggccccctcaatattcttaacattgacatcctgaatttagtataggacacattcaaactgtgctcactggtcacttcttgatctcaccaggcttggccttatgacatctttctttatctgtcacttctttattgttgaccaacaagattctcaaactattgaattgaacatgaaaacagagcaaattaactcaaaattaaagtaggcagttcaagattaattcatgtctcaaaatacagcttagggtactgaagatatagtgactacttcataaacacattttctagcctgcgctggagttcttcactgttttggtgtcagctattataagctccaggatgattaaatcttaataagttgctagtatatccagagttaataaaacttagtactgatttaccatcaattagtcaatcaataaataaaagctgttgacttttgtgttctgaatgtcagagaaacaaaaataagtcaaatgcgggcctgcccctaagagcgtggtgtgttttagttgtacatattaacaaaaaacagaaactcttatagtcacaagactaccaaaatgtatagatactatcatagctcttttgaggcagcagagaccaaataggactaattaagcagtgttggtttttcaaccaacacgatatttccactgggtatcaaattcacgttcaggttgagaagagggtgtgagtaagccaccagcagcagctgaaggccttctcatacaggaccatttgctgttaggaaagagagatggtcacagatgcttatccattgctcatttgtcacccaccactgcgaatctcacagtcccagcctaagaaatcaggacttagagggcagaactaaactcccaacttggttactatctccccatataacttctgtccagtattttgacccaatttctcctctacgacatgggggtatcagaggaattaacgccaaataatctaactagctctttgacgtatttcaggtatttcatgattttaaaaaacgcatgtttctgattcactgcctttattttcttccctcatattatggtaagaaatgaatgaaacttgtgtcaagtcaactgtgacttccactcttcctaatgtggctatgagagggcaaccttgacaccgtttgttattctcagttttcaacaaagagttaagagaaatttctgcctcctgtggttaggcctcctctccagttggcagaagtctttatgtggacttgatggttgcccggggcaacaaaatattagggactgaaacacgttcagagactcaactgtgtaagtgactcagggctaagcagctcaactgaagcccatgcttagctagaacaggtatctgcctgtgcctgtctgcattgtcacatcccttcagcacagtctaatactgtccttgctaaaatgctccaacacacactaagatccactaagatgagtcgggcccaaaccctagggagaggagttaaactcttagaaaacgatattctttcttcagccttgtctcactcttgaaggatcattaggcaagaagacataaacaagacgagaagactgattggaactttgaagaacatctttcaagaacacgatgaaaactcaataaaaattcagtgttagagttgcccatcaacaccaattatctctttggagtcagcagaagcagcccacaaaaatcaatacccgttgttctctctctctctctctctctctctctctctctctctctctctctcagacatttctagctatggtctgaattaaaatgtggattcttaaaaaaatagtttttctgttcccaaacttcttaaatcctgaggtcatctcccctcagttccatctgtctggctccatgattccaattactacagcttgttaagggagttactagcatccgggagttgtgtcttttgctcctatttggtgttgcctagagcaagaattgtagagggggagtattagccaagtcttgttacttgaagcctttcctctttagctgtttaactgggttccatgttaattatgtgtttgactggtggtgttttaatcctccactacatgtccttctcactctcagtaaacggcaccattaagatagcaagagcaattatattccttagctatttttcacaaatgcttatggcgtatcattatgaggaggaactgttcctgttggcatgctggagttgtgatttgaaatgaatattctgtctgagtgattggaaacctagtcctaaactccaagcggttcaccatgatgactctcatctgggcaaccacagcagctgtttggaaacatggcttgagatcacttgcttgcaaatgtctttttttccatatgacctggggtagaattgagcccatatatgttactcgatgtgtggaacacatgtgaccctgacagatgacttcgctgaccttgaaaactacagctgtttggtcaccgttgaaaacaaagttacacaagcgatttactaagtttactgtttaaccattttatgctgaactgtagaacttctgaaccctcaggggaaaactgtatcttcctgagagtgaacgtggacattagttttactacatattttgaaaaagctgaaataagactctgatgttacaggatttttttttcaagcacatgtggctttgttttgctttgttattaaaaaaaattaatgaagaaatccaagcttgacttttgtttcctttccattcaaatcaaaagcggtctgtattctcctccaaagatcaaaggtttgtgtgtgtgctctgcagtgtgctccctgtttagaagtcacattgtataaggctaatgttatcttctaagtagaccctatacgtgatccaacttatttgttttttgttttttgtttttggtgtgctattttagctacaacttagttaaagcaagagtaaaagacatctgaaattcttaatatttatatcaaaacatcaacttgttaggttgtgggtacaatccagtgaaagtatgcttatgtgaggttttgggttgattcctagcactataggggttggggtggtgagcaaacacaaaatcaaaatcacagtaagttgtatatcctaaatatatacaataaaacaagctaagaagttatgtaaattctggtctgatgacttaccctgtaatcctagagatggctaaagcggaactggcatgaatgtagacccgatctgagctagaccttaagttctaagtcatcttgggctgtagattgagactccgtctcaaagaaattttattttctttctaatcaagacagagggtttttgtttgtttgtttgttttttgtttttttttttttttttggcttttgtgtgaaaagaacccaagaaccacgcgtcttccagatatttcctcatcactagattacgggttctctccttgaggtctatgatggctgcctgagcttatgccatcacacctaagtgatgaacagccaggtggaggaaaggagaaagaacaacacttccttccttctggaagacacttcccggaagtcctgcgtaatgtcacaacctacttgcctgcaagggcctcttggtagtatgctttcctcgcaaccccctaggtcaaggatttacattccctttaaggctacaaacctttatctaacctctcaccattcagtctttctcaagttcttcttcgtcttattgttacctgtcttggaaaaccccaggcctctttggagctaacaacccactctttccatcctcttggtaaatgatctcctggggccaaagaaaaataaagacttttcacagtatcagataaccagaacacatgactcttggccttcagtctgcccctttccttcctccttagtgtttgtcctggacattcctccttggaagcctctcagctcagtggctactcagcacccctcagcaatgccctcagctgtggctttgagaagactatcatcaagccatgagcttcctcagcatctgcatccttttactgacacccacggtggtcccatcctccttctggtcccttctccttgatgctcttactcacccctccatctgcttctttgcctgtctctcctacatttttccaggccctccctcatccatcttccttgcatctttcgagctcctcctgggaacgaatcagcagcaaagctcacatacaggctttttgttggcccttcttgtggctctccctccccagatcagttgtcataactcgtgttgcccttccgttctctgcaggcctttcaggtatgcgtccactccaattgcacttacagtgagcttctgtttgccacagctgctggctcttcctctcgagctctctctgctcatttctcagtgactgcttattcaacaggctcttggggcgctcttttctgtcagatctcacagccttctagcatctctgaaggacccttaccacttttcatgggctgtgttcctctcctctcctaacaaggaaactcctctgcatttttgaaggttgcattccctgcaacagtatgcacgctattctgaaggcgacctccctaattctctctatatatttggttgattttcagattattcatgtgaaggacctggatcatatttcaaatatgatccaacctggattcatgttcttcttgctaatgtggtttttttttatcctgcctcatataatgtggttttttttttttttaaagatttatgtattacatgtaagtacactgtagctgtcttcagacacaccagaagagggcatcagatctcgttacagatggttgtgagccaccatgtggttgctgcgatttgaactctggaccttcggaagagcaatcgggtgctcttacccactgagacatctcaccagcccataatgtggtatttttatgccagatttaaacacagaacacacacacacatcctatcaaatcaatagtttttttgttttttggtttttggttttttttttctaaattttctctcagatctgttctcctctgtaacacacagcttctcctttagctctgaaatccctcccttcttagaattgcacctggggtagtattttccaaacagtggccactaacattttatctttccaaaagatacaaagttgaatagaaaacagtaatgcacacagccacacctaagacatcaaggacaagcagtgttgtgagtccacacatacatttcgccacgaaagtttatttctcatgacaactcccccctccccgccccccaattggagaaacacgtccttttaaatgtcgggtcttctcttcttgctgttttctgtgttgcagctaaatccgcctcattgaaaacttactctgaaaatactgttctcctgcttaaagaaaagaaaataatagactggtttggtgaaggcaggtgtttccgagcttgaatctgaaaggagccgcaatcagctacagactcccacctcagtatagcgtcatgtataatgcctctgtccggttagatgcctcctctctggttcctaccttactcttcagtaccagtcgacttctctacccactcaccatgtctcctaattctttttttcactcacttcttcatatcccctcagctagaactcactttccgtataattgtttggtttaccgcaatgcactttgggatgagggggcaatgcaagctctgccccactcaccaggctgagcagtgttctctggacttgggtgcttggcagccttggtagccaacccaaattcagcatcacactgatgaaaataccccgtagattgttataggtctggattcttcaaagccccaaactaactacatcagctccgtggttgtcttcatcataggatgccgaggcaacatcacacctgacttccaggttttcaggagaccggaagtaaaggtggtccgcaagtcttcccatcgtcttcacagggctccttgggatgactcaaagtatggaaaaacgaatcacctagaagccagcatggcaaaatattctcctcctaccctgcaaggaaactggggttggaagtgcgcttagcccctttgacagatacaaatgagctgagagaagcaaatgactgctggtcctctccttacagtcagtccgcagattcaaaacgaggagactgagggagccccagccactcctgccgggaggatgagcacgttatttatttagctttatggaaacactggggaagcatgtctgggatgtgacaggtgtggggtgagtgtgtagccctgtgccaggtacccagagggctgctttgatagggaagtggatttttttttctatccattttccggttctgtggctgtatttttccatcctctttcccatgaaggaatagatctccaatggctctctcacactttcctccctcgcttccctccctccactcttcttcctcctcttctcatagaccagaagctggccccagtcatgcctcccttttatgtggtgggtcggttctgttgcgtcgtttcatggtcttggaccgagagccgcctcagtagtcaacaccgaaccctggaccgtgagactaatgggaaaagcagaattctttcaagtaaaaggaagtggtttgtgttgtggggggaaaaacttggaaagaaacgacaccaagaacactaagggctctattcccctcactccctacagctgggttaatacatttcaaaatatttagtcaattgagttaattccatcaaacggctactcgatgccgtaaaaaggaagggaaataaacagatggttttaggaaggactggcttagctttctgcaaccttgatcttactcatttctagagaatgagttcaactctaaggaaatgtaaacatgtcattggcaaaccattacaaactaagttaacaagaatggattttgaaatgtatattcaagatagatatatatatatacatacatacatacatacatacatacatacatatacttggtaatatatatgatcccaagtgacgttaggatagagcacaggcatggattgtatgaagggaaaagaaaagactaaaattgagagaaattcttttctttcttgtatactaaaatctgacctgcatgattctatcttctcaaagcaaccttaggagataggcaaacttactatttccattttataaaaggggaaaataacattaggctcagagcagtttaaggcacttcccacaatgattattctgtaaacgtgggtatattagctgggctcacttttaatatacatattcaacttactaaaagtgaatgtatatgtatagtgatatgtatatgtatatcactagactggcttgtaggctatggtccaggtactttaatagatgtctcctgatgcaaaaggctgagaacctggttgtagttcagtttacaaggctggatgtctcagcagtgccagtttggcactagagtccttcagggttcctgggaagctactgatctaatacaggtgaggggatgcgtcagcaaggagatagatgaacttgccagcaagagtgaaggtaagcaggcaaaaagccgtttccttcttgcacgtctttctgtgcagctagcacgaggggtggcccagatttagggcgggtcttccacctttaaatagtgtgattaagaaaatccctcagaggagcggcccaacggcttgggttttagtcgactgattgtaaatgtaggtcagattagagcccctggatccaccgcattgtgggtccagagtttcaatcccaacaggtacatttccccttacctgagaagagcacgggactgtgtcttttgaataacctcagctccatttcctgtgctctctgtgtcctgttgtattttccctttaattctttcccaccccttctgttcttcttctacacccttcatccttttattctttaagtttatttctattgccttactcttgccatgcggttcatcctcagccctctagacgatcccattgtaacagtttggacgttcaacctcctccagagaacctacctatgtttagaccattgttctctctggctggtgacacttgtgggaaatggtgaacttttaggggttagggaggggctgtggaaggtctttgaggatggggagggggcggcagcatatcctgaaaggtatcacagagttccagcctcttctctttccacatctttaatggccctgatgtgaatggttttacagacatccctaccacagtttttttttgcctgctcaagcccaaagcatcatggtcaatgggtcacagtttaaaaaaaaaattcttcatccccccgctcagctctttgcatctcactacatcttctcccaggtccagcttcttgtcaatcttatctatactcccctagcttctccttgcctcagttagaaatcgccatctttcatcaccagagaggccaagtataaatgagaatagactgggtcattctgctcccatacagaaaacactgtaattataaaaatggatttgattctgacagatatctcataaattgggctattgttgagcttcagatggtctctagtgaaagacgtgcctctctctctctctctctctctttctctctctctctctctctctctctctctctctctctctctctctctctctcccccctaccagtaagtaagctctagatagcagataaaagccaaatgaaggtctgtgagagctaaacctaatgcaatcctgatatacaattcatttgtggtaaactcgatagagtgccttgtgatgtagtactttgaacaaagtcacatttagctcaagtgaccatattttgaactggccaatatagaacaacatagggtcatctccctgaatcaaacctgctccatggcttttcctggaaataccccaagagctccaaagacagattccagatttccaagctactagcaacaaatgaacatcttttccttgtgagataaatcacagaactccctcatcagcacatggtagcattctaacttgatcagcctcattaccagaaataactaaagcaaaataatgctgttcttcatggatgctggtaggccacgctgtaaagtcttgcagaatcatcagaactcaagagacatgaaactccatcttgtgcttacaaagaagccagcatcaatttcagactctcatcttcttgcttgcatacatgaacactttcctttctctgggaacaggtcctgtgcctatgctacctgctctcccattgacccagttggttcatggcttgctaaaacttttctagccaaaattttacttcaagctatctgtatatgatgatggtgataacgatgatgatgagtttttttaattcttgattctacttaccttcattgtaatttcccatttacaattgcacttaaaccctaagtgtaattaggtaactaactattgctgtgatatgttgccagttcattgactacccatgagccaacaaaccacttgctttggggttagatattcatacctggtctacttaacaacgagaaaaaaatttttttaaacaaaataaaattcttgagagttcctcatgtgtcaggcaacttcacagagttcttgggatacaatggtgaccccaaaacaagcactatccctgtccttagttctcatgactaggggtaggtcaagggaaagatatatgaataaagtagtcatggtactgaatataatattcccaacctaagtatgtcctatgaggagaaacttatgaatgaccaggaaaaaaccaaaccaaaccaaaccaaaccaaaaaccctcagtattgccaagttccagaaatctcttggaaaaacacatacttatgcatagcataatggagattctgagcaaactccagaagcatgttgcattacacatacacacatatgtatgaaatatgtgtgtatgtgtgtgcttgtgtgtgtattgtcttagtctgaaggctttgcccagatagcactgaatacacactgatttaaacttaaatctccattgtgcatctatttctcacttgcaaaggctagcaatatgatactacaacttcgccaagctactccaagttgtagtcactcttagttccaaatctattaattttttttttaaagactccggtggaaggtgaaagccagtgtttactcccacgtttcaaccaacctgtgtgaccacagggaaccagccctaggaaccaacaggcagaccgtaaggactatcttttcaaactctgaaattttcctaaaccccagtccagtgttggtcaaacgctttacaacctctatttgtccctaggcagttgcctgtgcctggaattcctgcaccaaggtacccttgtggtatttttaatagtgttgtttgatgctgtagccagcttttctgcggtttgagagttaaatgggatacagtgatgtggtgtgctataatagctcttggaggaatgttaagacaaattaaagtccaagtgagatagcacctgaaggaacctggtccttaaaaaaaaaaaaaaaagatcctaacatcatagaagggcttaggagttctgaagaagtctttaattgaaaagaactatcttcctattggtcaaactgatgtttgcagctggcttctttgcccaaggacggagttcactgttcttgcccatctgggtcttccctgcttgctttcctgccttatacacctgagcatgcatatcagtgtaggagaaaataatacaaagggaggtggggtcgtggtgtataattaacaccttgagttaaagcatccactctgctagattaatgatctccaaggttaagcaattactaccacatctatcaaataggtctgacgtcagctagtcacattctcacactcaggtctgagctgagcacaggcacaccaggatcccattgctgagctgcggtcaggttttcctcgagcagtggttacacatctatggaaatgtgatttgaaccacgtagagtggtattagggtaatgaaaatatttgtctgccatttaatataaaaccagttcttcaaaatatctgtgtatagctgggtgtggtggtgcatggctagaactcctgcactctgagggctggggcacagagattgagagttcaaggttggccaaagctatgtagcagcatcctttctcaaaaattaaacagtttgggatgtagctcaatgtaagagcacttgcctagcctttgtaagaccctgggactaacccccagctttaaaagcatgtataagtacacatacatacatacatacatacatacatacacacacacaccaaatacatacatgtatgggtatatatgtatatgcatataatatacatattttcatatatacatatgtacataaatacatatatttgtatttggacaattacttccaaagtcttcagactaaaataatacacatacacacacccaaacatatttcatatatatgtgtgtgtgtgtgtgtgtgtgtgtgtgtgtgtgcatgcatattgcaacatgcttctggaattttctcagaatctccattatgctatgcataagtatgtatttttcgaagatatttctgggacatggaatacatggagctttttttctggtcattcataagtttcccttaataggacacatttcagttggaatactactattactactttattcctatatctttctcttgacttactcctaatcacgggagactaaggacagggatagtgtttgcttgggatcaccattggatccctagaaatttgtgaagttaagtagaccagatgtgaatatatgactccaaagcagacaacctgtgggctcaagggcaggatctgggcaaggggctgggttgaagataacaaaataaagtcttcaggcttgagtaccaattagttcctctactgaaaaaaaaatcaaatgaagcaagtggccactgagtttaagataaaaacctcatcatacatatatgcatgtctatatgtgtgtacatatacatatatgcaaaccaaatgcatacatgcatgggcatataagcacataatatgtatgtgtgtgtgtatatatatatatgtatctggtttgcatatatgtgtatgtacatatatgaccatacatatatgtatttggtttgctaaatggtgtttttcccaatgtacctttatctttgtagtaggcatatggaataaactattatttatgaagttcctctttaaaagtccccacagatgaaaggtttattttagaggtacaggatatgtgcactgttgcactttctcacatggtgtgagggaaggctctagtgtctgtgatgggaattggagctgtgaagcccagggaagacaagcaactgacggctgaggtggaatttcaggagctctagtcaaagtgtccagagtcaaaaagttcagagaggaaacctacctgtcgatttcttttctgatacgcaagtataatttgtctcctctacttcaagtaaaacagggtcaccaaaatcccaccgaggcaaaagtcagcgatctgaggatctgggagggaggatcacaaaataaagacttcgggcttgcacatcaactcattcttctaccggaaaaaaaaacctctcagctaggaatgaagcaagtggcacctgggttcaggatgagaacctcgtaggtaaatggtcacactgtgggagattaagctacccaactgggagagctttatcttagcaaaaacctaagcaattctcataattccctgggattattagaaacaaaagttttagcaaatgaactcatatttaaaacacagttgttagagtagaggtggctgagaaggttcaatgcttgttaccagacctcagtcccagaacccacacagaacaaggagagaatcaactcatggcagttgtcctctgatcccctctctgtctctctctgtatgtgtctcggtttctgtctctctgtgtctctccctctgtctctttctctctgtgtgtgtgtgtgtgtgtgtgtgtgtgtgtgtttctgtctgtgtatttctatctctttgtgcatgtgcgtgtgtgtctctcacacacacaataaataagtaaataaatagaaacaagatatacaattattaaagcccacctctctacactgcatatatttatatatccagcttagacttgtggggggctaatcaggtccctaagaaactctacatgccattttcagataagatgaagggtagagaagtttaaatagtgtgaaacttattttcaggatcaaattcaaggtgagcttgtcagtcacactgaatttccaggctggccaattcagccactcaggaaagagctcaaggtactctggcgctgtcccttatgctgtcccttactgatgtgtctcagccagatccatcttagggataattgatgccttagacataaaatttgtttaagaatttttggcttattttgttttgtatcctctgactcaaatagaaaactccagtgactattgctttatatatatgcacatacatacatatatatgattttatgtgtatcatatgtgtatgtgtgtgcacatggacaggcagcgctctcccctgtaaatgaacatggagaggccagtgctcagcttctagtatcttctcttatcgcggttcatctgactttttcgagacagggtttcttactgacatgagagcacagggtttgagctagtctggcaggtcagcacactccatagatctatgtgagtctgttacatcagtacaccaatatcaaggctacagaagcaagtcaccacagcagccttccacacaggtgttgaagatcaagactcaggtccccatgtctgtgttgttaaggctggaagcctttcccatagagcaccttcctaactcctcgtaaagtatttcttttcaacttttcattttattttttatatttcaaatacattttgtcttctaccataaatgggggaggaggagtagagagacatttgtatatattcacacacacattaaggaatatgtactgcagaagttgcatatacttgcccttaacatttgttatgtaggtcacaaatctgaaagacgtctgaggggagcctaaatctaggttgaatacacacttttcagtatttctgtttaatttattaaggtaaatttttaactctgaaaagcaagcacagggcagtttgtcatctgctgtgtctctgtgggaagtcttacccaattatctgatcagtctcgcacctctacctctctcctctccgcaggatcagggcaaggagaattttcaaatccaatctgaaaataaaagtttggaaaccttttagatgatttgcaccaggctaagtaatttggtgtggcaagacagtgagtcaggccttcgtgcacttctgaggaaatggcttgtttacatacttaaagaattggctctcttcagcacccacccttcgaagagccatgttccatcctaggaagcctggagtaattaccagccatgcctgcctataagcttttctgtaattgaaaactttaaaacagataatggactttcaagtttccaatattaaaacatgtcccagagagaatcagttgatactaacttcttgagtattgtataaacatattttatgcatgtagagacaaagtacatattttgtgtttagtctaaatataactaaggtaatattttgtaatatgtttgttggggaaaacaaagaagtttcttccagctgtgtttatttattccagtttaaccaaaataagaactggagtcattaacttcttaaatttatttttaaacccatatattatatttctgttaactatttgtaagagtacttatgtctagtagacattacgttaattttctggcatagaattatgccagtgaaaacgatctgttctcaactgaagcttgacagtctgagatacaggatatctgtaatggcaaggagttgcagtcaagggcaccctttgcagctatgggatagtttctttgttgttgttgcttgtttgtttgtgctttgttttgtttggtttttgtgcttaattcatttggattccttgtatcaccaaaaggatttacatagccaatgaaggcaaaagtaaaattacatttttaattcactcactggaatttgatgtctttaaatttttatatggattatatagaggtataaagtttcgggttgctaaataaacctccaaagttaattttctctgaatatctaagcatcaggagtaagaagtagcagatatgtcctcctgtgtgcacacagaattccagagaggggtaaggaagattaggggaggggagtaaaagcttggaggcagcaaacccaggcatcatcctataccttctccaacttagtcacccaaagcactggggaaaaccactggacctgcttgagtctcacttcgatgactgtgaaggggcgtggggtacaactggattattccagggaccaactctggtggatggggagtgcctggcacacaccaagaattcacacacatctttgcacagaaagagccgtgcactatgactatcctttgtttatctttttgcttctttgtgaaagagaacatatatattacatatatatgtatatgtaaatatgtataatataatgtaatatatattacattacagttatatatatatataaatttaagtgattcattttctaagtgatcattcagtaaatattctttgcggaaagcaatatgttatccttgataatatcttccaagtatgatagtgatcacatacaacaactggggagtagaggcagaactgtcatgataaatttgaggcctgcctgggttacgtagtgggtttgataccaacctgctctacataggagactctttctcaaacacacacacacacatacacacacacacacacgaccaccgccatcatcaacaaaaatctttaccacctctttgagagaccaaaggtatccataaagcaacaagagctgaaagtcactctgggtaagggcgctttacattgttaaaggagggactctaagaaggaaacttcccagatttggtttgaacatgtaagctgtttaagccgtaagcccaggatgatcatcttaacctggttggtattgtgtcttcatataaaataccatgtaatttgtaagtgatttttgctatatatgcagttttattccccatacatttattctcaggctgctaaaaagtaagctattgtgaacgcaaactgtgaaaaattgcatggtacttccatatgcaccctgcgaactttgtcagctcacaacaactcctacttagcatatacaaacccttcttctatggagctcatcagctatgaagctaatttaaatacatgaaatataaagattaaatttcaagaacactgctttcctgttttctttcttattatccaatctacagggtagcactcattgctatgtttcctacgctttttagagtcattgatacccattacttgatgtcttattttatctcctctgaacatagcatttgtagccttaaaagatgcatggacaagtcccctgagatcaaataataggttgtgagggctgggaaggttctaactgctaagtgatgcgggatcccctttggaggcaaggaaagtgagctgggagttgtctcagttctcagggaagttggtggccaggcttcggtctcctaacccgcaccacacttgcttttcaacacacaggctgccttaagataatagagtacaatattttctggtttacagtagaaaattagactaataaagacactaatgtgttctgtagttcaatcaatttaagcttatccccaattagcttacaaataaatgagacttagactatggctattttatttggctttgacaattactggggtgaaagccctaatctactcttctgactcctggcctggctacctctccagccacccgtgtgtcctagatacttgctgtttctcctggccatgtggtcatcgtccatctcccctcatggcgacttcctctctcccctcgtttccttcctcctcttccctcactctcccccaaccaggtcactccaaacacgcctacctctaatccctccaggaattggctgtagccaattttatttaaccaatagttttaaagcaaggaccaaggaacatcaaaagcctgtaaaaaggatgcattacaatgcttagcaacagaacaaaccttaacagtgctctctcttataagccatagagaaagtccctaggatggttccttggcctgcattgttgatcttgaaagcatccatagtggattaagtgaagaggcgactgggaagtatataaaaaaaagtataaactgcctttgctgcgttctactttggtagtacaaagtctgtaaatcaggacaagcagggaccggataccaccccagtggggtcactgccttggattccatagcaggccagagtctgacaattcattattggtctcaagacccaagtctagaagccagtcagctggggccacaaatatgttttttaccaaatgttatttgaatgagatacaaacaaccctggaagcacacaaattaaattattgtatctgttgaattaggtcggatattggaatgttctttgctttatcactttgccgtgatgtgagcagttgaagatgtttggttgcccaaaactgtgctaattgcagtatttattgagtatgtgttagggcctaagaactgtctatgctttctaatatgcactttgttatttaatctttataatcaataaagcatgtgatttatcttaattaactcacccaaagatgtgcacagtaaaggatgcagctggagtccaggctgggtcaggctgactttgataacctcttcatccctacgcttaatcaatttctctacgcatgctacacatccacttgatccttgagttgatttattcatggtgacatttcattttcgttacattcaagtaggactcgttactataaaagctagccacagtgaccggagcttgtatgtgaatgtaggtgaagtgtaactgagcactcatgagggtattgaagagagggaactaaaggaagcatgggggaaggagtgctactcaagggggatggaaaaaagaagaaagtaactgcacctgctactgtgaatgtaagcggaacacattgttcaatgcccccctatattccctcccaggcgattcctgcaaagtcacccctgtaattttcctcatctcttatctctttctctttccctgcagctgttgtcagtgtaatttcatttgttcattcacttacctggatccttggctcctcagagacaacagattgggccttagttgtaatagagtgtctccagtctggggaataggtgagctcggggacaagaggcagacactaaccacgtcatatggtttagcaaaggagcctccggagacagaagcaacttcaggccctatcgtctttcaagactcttgggaagtacagtgagttagaggctctaaaaaaccccacaacaagtggcacacttatctggcttagaatatatagtgtcattgctgtcaaaaccatctcttctgcacaccatccgtcatcccaggatggactaccatgtaggattttcagcatcccatattgcagaagatgtgttccttaaaaaccaggttgaagtctgtattagtctcagcaaaactattttaagnnnnnnnnnnnnnnnnnnnnnnnnnnnnnnnnnnnnnnnnnnnnnnnnnnnnnnnnnnnnnnnnnnnnnnnnnnnnnnnnnnnnnnnnnnnnnnnnnnnnnnnnnnnnnnnnnnnnnnnnnnnnnnnnnnnnnnnnnnnnnnnnnnnnnnnnnnnnnnnnnnnnnnnnnnnnnnnnnnnnnnnnnnnnnaaactattttaagggaaggaatgacaatctagccccaccccaacccacccagccacaccctaccccaccttaccccacccattcatgtcccttaaccaggaagggcctctcaggaacttccttacagtctatggagcactaaggagagccctgtatttgtccacagactcaagtttgtgcatgaaaaggactatgtaagcttaggaaaaagttaatttatctgggcctgataatgaaaccctgtgtgttccccatgcatttaaagatggtcttagtgatgaacagcctgagaactaacaatgaatttgaacaaggaggttgaatacagggaaaagcactgaaagatttgacagtggtgcagataactctgtaaagtgtttgtttcgtagacaaatgcacacctagttataaagcttcatataataaatatgaatgttttcttaggagtttaaaactggggatgaaggtcagttgatagaatgtgtgctttgatctccagtaccatataaatgccacacaatgacatatactgtaatccagcactgtggaggaaggagggtcacgagttcaataccatcctccactccccagtgtttgacatagttcagtcagggctatggactagaacaagcaccaaataagctgtcttttagtctaccagctccattttcttctcacctataaatactgaaactgttgcctctttcctcttactacttaagtttatagcttgtttctcttctttttacctcctaaaaacatatgcttcttaattgtataagtagtgcatgcatgcatacatgcatacatgcataatatagtaccttcaataggacaatctcctgtggctagccagacttttgcaacttcaaagactagttccacagacccagggtgaaatgtgtgttaaccttttctaacagccacaggcaggcatgtcacgtttcttccagttcccgcccccatatctttctgataacagtgtttgcttgccatcttagaaccttgaccttctgatgcaaacacacggacctaccaggatactcttgctcccaggcaagattaagatgaaaaactttctttgaaacattccataaccccatcccaaatttgctcagaactattctctagtccttttctttactagttcacaacaaggctagctctgttttaagaacctggagtatcacattcctttgtgccaaaagagcttgacaaggtctaagtttcccgcctcaggaagggatttacagtgaccatcacacttccagtcggagaagcagatgcagtttaacttctctaccctatctgaatgcatatacaagcctaagcagcctctttccagcgtttcttaattagatccaatctgcaggacatgacatgactgaattttatacccacatggagatgctcaactcaggggagcgcttagctcaggcatcaacttaagctcctaaagcaagaggctcctccgaaggaggtgtgtagccctgggtggtaattagagcagtgcaagttaaaactgcttcatgagctgtgccacctgcagttattgcccttgtggaagagctgtgccctcctcgctagcctggtgtatacatgaggaggcagctacggccactttcttccagttcctctttattttactttcatgccccttctcggatccctttgaactcccatgtgtttctgggatctgtctcctgcgcttacctttcagaggtgtgtgtgtgtgtgtggggggggggggtgatgtgtaatggggggtgtcctttgtaggtgtgtttgtctgtctgtgggaagtgtatgtgtctgtgtgtgtacccgtatgtctgtctgtctgtctgtctgtctgtctgtctctctctctctctctctctctctctctctctctctgtgtgtgtgtgtgtgtgtgtgtgtgtgtgtgtgtgtgtgcatgtggacacatgcttgaacataagtggaaatgtggcagcatcaaggattaagtagattaggcaactctgtacatgccagcagacactgaagttatagtgcgtgtgtgtttgggggatggggagccccagttctccctatcagacatgacttccagaaagagtgtctccaaaatgctgtctgatggtccctcctgatatcttcgggtaaagtttaaagatcttttccttttaccaagaagctgcgatgtgataaagtgaccagggactttgaggctttcaatagtgggtgagtcccatgtaaacattattacctcaacaccccccccccccgcatnnnnnnnnnnnnnnnnnnnncccccccccccccccgcatctggcataaaggagcaaacatgtcatgcggggtttgagtattcctgtggggaccatctgtagaaaacttggcatggaataaatactgtctgttcctggacatcttccctttggactactttgtctgggttcatttgcgtgttaggccccgcctccatgttaggcccctcctccatgcgcatgcgtgtccttttaaggccctcctgacctagagtttgaaggctccaagcttgctcgcatgttcacacatagtgttcctttcatctggaagtctctgttccaaccttttagagaaacttctgggcatctctttgtcccttgaaatagcaagtcctgaattcttcatgagtttaagccttccttccatctgatcataaatccttcacacatcttcattatattagttgtttttaaatgttttctctagcataactggattttttttttttttttttttttggttttttgagacagggtttctctgtgtagctctggctgtcctggaactcactctgtagatcaggctggcctcgaactcagaaatccacctgcctctgccgcccaagtgctgggattaaaggcgtgcgccaccacgcccagctgcataactggattcttcagtgcactttattttatcaatctatgaaaccctagcaaatattgctcatataactaagtggtacagagggctggggcggtggggggttggaaataggattcggagaaagctgctgatctgtctctgcagatcagcaacgcccccactctctaaatggacaaaaacattggaggtaagaggttagatggcttgtaagataactcgagacttccttttctgtatgaagtcttggaaaatgtgagcaagctggagtggcttttgattttccttctgcaaatggttactgtgaacatatacatgaaataaataccaacaccatcatcaaaaacacatgccctcacagctatgtctctgatgccctgctggagtctgaaaccttacctcatttcaggaaggaaagtggggtagcctgtgtccccagggttgggttccctctttttgtgaacactgtgaactaggaggtcattaaggggcttctttggtcttgatagattatctgagaagcaaccttgtacactgcggctcatttacaaccgggaatgatttaattctactgtaagtcagtgactccaccagagtatccggggccatatgcaacatgccaggagcatacattattaattacagcttccaaatcagtagcttctcggggtggtgacactcgtctcggaatgacagaccatccatttcaagtcaaactgaatttcagagatccactttgatttttcttctaagtactactttatctctatccatccataccatggtgcttgctaccttcatccttggtggggaggttgaggggtggatggaaagacagcttagcaaatgaaaaaagtgctgtacaaccgtgaggacctgagttttgatcacagcaccagccacatagaacaagcctgtcttggcgtttgtacatatttgtaaacctgatgctgtgagggacgggggcaggaggatcaccggggctttttgtctgccagcctagctccagggtcagtgagagactctgacttaaaagggataagatggagagtgatggagtagaggtggaggtagcatcctcctctggccttcactagcacttcactgcacgatgaagtgccacacatatatgtgctctgtctatcagtctgtcactttttatctttctctccttctctctgtctttctctctctgtctcttcatctctgtctctatcttgagttgtatctctgtttctctgccacactctgtctctttgtttctgactctttgtctctatttttgtctctgtgtatatatatgtctcttctctatccctctctgtctctttgtctctgtctctatctttctctctgtgcctctttctctctccctccctgtcatctctctctgtcttttggtctctgtctttctttgtctctatctctgtctctttgactctctctctggctgtctctgtctctctctctccctctccccacccctctctctctctcaaaaagaacagggctcaagaaatggcacagtgttatgagcactgtctgatattccacaggactagggtttcttttttttttttccattttttattaggtatttagctcatttacatttccaatgctataccaaaagtcccccatacccacccacccccactcccctacccacccactccccctttttggccctggcgttcccctgtactggggcatataaagtttgcaagtccaatgggcctctctttccagtgatggcccactaggccatcttttgatacatatgcagctagagtcaagagctccggggtactggttagttcataatgttgttccacctatagggttgcaaatccctttagccccttggctactttctctagctcctccattgggagccctgtgatccatccattagctgactgtgagcatccacttctgtgtttgctaggccccggcatagtctcacaagagacagctacatctgggtcctttcaataaaatcttgctagtgtatgcaatggtgtcagcgtttggatgctgattatggggtggatccctggatatggcagtctctacatggtccatcctttcatctcagctccaaactttgtctctgtaactccttccatgggtgttttgttcccaattctaaggaggggcatagtgtccacacttcagtcttcattcttcttgagtttcatgtgtttagcaaattgtagcttatatcttgggtatcctaggtttggggctaatatccacttatcagtgagtacatattgtgtgagttcctgtgtgaatgtgttacctcactcaggatgatgccctccaggtccatccatttggctaggaatttcataaattcattctttttaatagctgagtagtactccattgtgtagatgtaccacattttctgtatccattcctctgttgaggggcatctgggttctttccagcttctggctattataaataaggctgctatgaacatagtggagcatgtaggactagggtttcaattccagtgtccatattagtgtttcacaaactgtctatgaacccagcttcagggtatccagcacttccttttgtattctgcaggcactgcatgcatgtgactgacacttgtgtacacacacacacacacacacagacacacagacacacagacacacagacacacagacacagacacacacacatacacataaaataagaaaggataatttttaaaactcctagaccttattattcttatgtcttccaccagaacccaacaccgcccctggccacttccgaattcctcccctcccatttctttcacaggtttcttttgtcctatgtgataagttaaagactccagaaggtggctaattttagaaatactgtttcaaaaagccatacctgcgtagtaagtgtagaagtccttatgccaaagacggaaatggaaggaacatcaggacttataaaaactgccagggtcctccagcatctgggcagaggaagcagggagggcaggaacaggaacagctcagcttgtctcagcattcagccaatgcctcgggctctgaaagtcaccccaagcaggccccagtggcccacagttcagagggagtcccttgggatatgagatgttctctgctttgaccggtgaagctcctggcaaactgggaccagtctgcctctctaccttccctcttttctacacactgctctttaaattctcatttctttgtaaatagacaccaatctgcaattcttcagtattcgaatattcaaggatactgaatccagcacatctgtctgggagagccctactaacaaatacctgtagttgcctcctgttgtgactggtgacctggtcgtgactgtctggaatgaaatgttaacagtttcttctgtattctgatagaaaatactgcaaactttaatttgcctaaacctctttagaatttaataatatagcttccctcttttattagcctctgtagaaataacatcttatctcttattatcttgcacagtgctgttatatgtaatattctgtctgtctctgttaaagagttatgggttgtttccatttttacttctatatatttcaccatgagccttcttgaacttgaacgtctctgtgtccagcttttagtatatttgtcaaataagttcgtagccgtgaaactgaatttaatactttcacaaatactgtcgagctgtcttctaaaagattgcatttatttataagcccaccaccgatgtgccaaatgctgtattttcaccatcactaaccctgagatttgcatacaaaaactttcccccaatgggattgaactgcaaataacttctattacctatttatctgtgtgcttacaggctacttctctcattatctcacttttagtaaaaagacaaaacaaacaaacaaacaaaaaaactcaaccaattgtctttgggatttttttaggtttttactgatatgttaatgaacaccacctttttatttattaaactttcctttattttatccaaattgactttagttttggataaacttttttttttaatgatgtagtcttttaagatatttttacaaatgaatttatgagcttagtatggctctggtcaccgctgctatcctgatccttggtgcagagccatcactaagtagattctgaagacacgctttctgagtgagtagagtttgcacggacacaggacagatggagtgagccttcttcctcctcatcacgaacatcatcgggaaaacaaatcccaagacacacatctcaaaagactccagcaccatttgatctcaggacaggaactttgctgctctgtcccacaggatgtccctgtcacgtgacgtggggactggactatgaaaaggcatgtcttaaatgaatgatgtatggagaataatgcaacaaacagaggtcaactggtttggtttttgtcctcctcctggaccagtgacatggtcggttgcaaatgacccctggtatttggaaaccccaaactgcgactcactgtccctgaaggctggttatccttgactggactccacggaaggtaaatatggacaggaagaggaaaagacagggctatcgctaacagtggtttggggccacatttaattgagtgtagagtatctataacatcttgttgggtttgaaaggttaaaacctttcctagagaaagcaattattacccactctagcccacatgctcataaaacagcctgatggctaagaacagaaaacaaaccaaatcaaaataaaaggaaccaaatagcaacagaaataaatgttccttattgtaactggatgatagccagacctgcccactgcagacctatggaccttatagcaagggcttcacccttcaagctaagctcacccttgcccagtggacatacagtgaggaacagttgctctgtcgtgaagttttctgggtcattcatggtctcaggaaaatcctcttgttggtacactggattacacatgtattatgtaactcgctgcaacccaataactgagcccatagtttcatagccattaaaatatgccacaaaccaaaccacctgtgaggcgccaactcagcaaatacgcctatgcaaaaagtagtcattaaaagtcaaggatacgaagatgaaagagtccagttataatgagatcatgtatattgcagctaccaggcctgggcagaagactgtagtatgcacgttgaagggaggcagcagcgaggaatttgggggcactgaagaccaccatcactatgagggagaataaagcatataaaatgaatcagcaaccactcctgcaggtcctcattggaaaaaaaggcagttatagacaatcacatgcaagcactgagagagatggtaggctttagagtggatattgagtttgttttgtatggaccctcagtgcctggcctttttttgtttttctttttttttttttttaaattaatttatttattatatgtgtgtacactgtagctattttcagacactccagaagagggcatcagatttttgttacaaatggttgtgagccaccatgtggttgctgggatttgaactcaggacctttggaagagcagtcggtgctcttaactgctgagccatctcaccagcccccgtgcctggcctttttaaatacagcatgggcatgtttatggaggaaaagaaatgctacattttagcaccctgttctacctgatttaacttcaaagcccacaactttgtgaagagaaatctctttctttcacaggatagcgttaagtggttctaaatatgttaccttacgctataattgaataatggaaatgaaaccctgtggaataaaatacatgatagctttccctccaaggccctttgttctactaattttccctgttaatgctgtggtcatgtgacctccagaatttctcctcctggagaaatacaactgacaagtagaattggcatcaggtattctggactttttttcctttcctccctcctgtcctcctcttctttcttgtgtgtagctgtctgattaacccaccctttcacccaacacggacccctaaatctcatattattagcctacatttcctagaggagtagtcacacatgctaacagttgatgggcacgggaggtcatgcaaagccaaggaagtaccagagtatgggggcgggggagtgggggccagggaagaatagccccagggaagatgagaaagcatacaaaatttgtcacctctccaccagacacccagctacttgctaagttacaagagacactgtctatgcggctgcatgagcgcctgggtcttggaacattcaacaccacatgggcagggcatgcctaggagcaatttttctgtctctgttttgtctctccttaaagttcctatgggacctcatgcccccatgacctcctaggattgcccacagagcgcagaacttaaaagcacaagtgactaggcagctcctgtccaatcagaggcgtttgcccatttgttgttcccttcaggaaacaggcagagctgtggcaattggagccatgagtaggcttaaactgaagctgcttctgccaggacacagaaaagagattgtgcccaaagggtgaagtgggcagagatcacctggggaggacatatccagagctcagtgtgttcagctctaagtcacctgcaagattgtaatacttataataacaactcagtcgttaaattattatgctctctttgggtaatagagctttcatattgaacggtcgtgattcagtagactcctcggactgaggagaagataccagcaatctgcttgatacttacagagcagaaaagctagaatgtgaatgtagatcttccaatgactgaactcattgatctacatcattgatccagcgttcattctactacgagttctcaggaaggacgaacgccgccatgtgggatgctgctacacatgacagtgatgatgagacgggggggggggcttttctttctgtctctcataacaaaatgtctcctcgtttccttcttgtgctgtgtgtgtaacaggttcagaaagaggcagagacacagagagaggttttaggggtttctcccccccccaattaataacagaatggggatggacctgagtggcacttttgatggcaacatgtactgtaatatacatcctagaaatactagattcagcaaatcaaattcctaatgccgcacaagctctcatgacttgggctgggcaagtttagaaacagctttcccaggacttgagggtttgacagacaataatatttctagtacatgatcttggcctcaggttagttatatcctgaagcagaagaatggatgccctttttcatagttaggagtgccatgagtatcgacagcagctcccagtgccactggctccctgtggattggaatagcaacggggatttttcttaaggaagactaaactagtgttactctcatatgttccttgacttgtatgcgtctgttacgttaagtaatttttaacgctatcttaaaatattctcatggcctataaatatacattgacattctaatgacaaatttggcactctaatgacaaaattgatatagtaaggttctttagtcaggatcccttcacatcacatattgagagttatatttctagtcagaactacagcagagaaagaacatgtgctcagtagttgagtttccattattatgacatcataactcataaaacataactcataagacaggaagggcctgttgggggatgctgaacatggtgataggaatgaatggtggggcagagtccctatatcagcaaccaagaatcaatatgggtaaaagggaagggaaaagatccctaccgtcccacttaagggcatgcatctactaacaaaggactagtcactagtcacactgctaaaagaccccacggtaccaagagcgtcaggcatagacagagctgctaacctttgggatctattttacattcaagctataacatctctaacttgctacaaggagtgaggaaaatcaagtagggtaacctgctccacttggtactccatgagggctctaatatatgcagaaaagaattatcgacctgtacctttcaagattacagcaacaattatccctgtgagtttgaagtggctataacgggttggtagttattattatgttaataattttgaagttaaagatcttagcatgcttcttctacagctataaaattagtctgtgaaggaacgcagttaaacctatggaagccaccatatgttgaaaatgatgaagttgggaaacagtggtaggaagttataagaaaaggcaaagatgagagtgaggaaataaaagaaggaaggactgtaacttagagactaaggcatgcatcacagagcactcaagtctgtgttttgatgggaactgccactggatttaaggttcccaactttgtaatctcaaaaggcaatagctccccacacaaaatcactaactttttagtttcgccagataaagctatttccaacagagcagctgcctggtactagaaccatgatttcatattgcagtgaccatgtcctatatttctctatacatttgaataaaggacaaatgaatggccatcttttcagtagctctatagacaccttttgcgttcgcccttacacgtgtgtgtgtgtgtgtgtgtgtgcatgcgtgtgtgtgtgtgcgcgtgcatgtgtgtgtgtctgtgtgtgaatgcatatatacacccgttagctttgctactattattctcttaatttttgctgagggccagtgaaacattacttcagaataccataccaaagtatggtgcttggcagtgaccatgaaaataccagttgtcaggacagagttctttcctaatctctcaagacccatttccaggggaaaccacagcacagagcatgacatggcccatctctgtacatgccaacattttattaactgactgctttgtgaaacagaacttaagtaggaggtagaaacacagaagtcaagaatacagttctttccttgcatggtagaagagcaaagaagacccaagcaaagtacaggaatgaaatgtctccaagatcctgaaggcaaagtgcagttgctaagagaacatgcaactaaatcacaaacaggactcaggctgaaatgttatgggacttccctggcattgtgtatgtcttaaggcacctttcctatgtttgaaaaaggcaccagctctgggacgatagaagctgaagggatgtcccctgggccagaagcattagaaaatgcagtctactcctcacattgacacagaccatcaagctgggggcataggttgaaagagcatccctaatgaagggagttgaatgattaggtgtgtattaaacctcccttagtggttgggggttggcttttgtgactattacatgctttgcgatggcttgagtgaagaagaagaagaagaagaagaagaagaagaagaagaagaagaagaagaagaagaagaagaagaagaagaagaagaagaagagatattaactatttaaagtttactaaggtgtagggggcaaatctgtattggataggtaagggctaatgatctgttgacaatgagttcctttcctctgatacaccagtccagggctaaatcacaaagatgaataccctcctgtgagtcatacatccttctcctcttacaacgtctggcttccctgattcacatccagtctagaacttatgcagatggattttggttttgcttgtgaaatctggacgagccaacttaagcctaggtgaccaccacgtgtttctgagttaagtcttatgacaattttatattaaactattaactgcaaagggggaaaggcacttttggatggatgcaaatctcattattaataaaaatgagttaattttccggctgcctagtctacagtgaaatatatttcatggcagtgattctcagcctgtgtgtcatgaccccttttggggtcaaatgaccctttcccaggggtcacctaaggtaacaagaaagaattgtatttacagtacaattcataacagtagcaaaattacagttatgaagtagcaataggagtaatttttatggttggggccatcacaacatgaggaactataataaaagaaattagcaataggaaggaaaagttgaggaccaccggtttatgggatggctcaacatctcacaaacaattaggatttccagagtccaaggtctttaatctggatctatctttcgggtgaaggaatgaagctagcttagtgcacacaattcattaacggtcaggtgaacactgacagtttgactcagagagagctcgcacagaccagtttctaaataatccttgaaggattttttaagagcacaattaggttttacatcaacttgacatctaagagtaatcagacactcagtgcagaatgcattccattatgttttatgaaactcataatgcaaggctgatgctctcatatttgctttagataattagtttctcagcagaaaataaaaagtcttaaaggaacagtgttctctaatttcagtggcacggaagagctgactcttagtgccagggagaaaatatcacctattcctttccttctccttttccaaacaaacaacaaagccttcatccaagccattattctgtattgggtttctcttgtgtgccacaccttgtgacagacctcagtaaacatcctctctaactctttaaataacccacaacgcagaagccttcatttctacttaagagatcagaaaacggtggctcacagaattaagaaagattctgaaatgacacagtagcaagtgagttcaagcaagtctccatctaaggtccgcctgcccctaaagccagcatttttcagccctgccacatctctccattctgaaccagaataagatacatgtgccaagagcaaaaagcatcagggggagattcatggaggtagccacagccctccaaggaagaggcaaaagttttgggcaaagcagtacaaatacaggtcaccagtcaagcaatgacatgaattagggaacaagtcaatcatagtatttagtccgtagcagtaggggctggctagtacacgagcagacactgggtctgagctgcccatggattttcttttcttttcttttcttttcttttcttttcttttcttttcttttcttttcttttcttttctttccttttcttttcttttcttttttttctctctctctttctttttcatgtattttagaatccaggaaaacttaccatttctttccagaactcatcaaatcgattattacttctgttttgttttgtttgtttgtttgtttttgagacagtcacactgtgtaggctagactagcatcttcctacctaacttcctgagtgctattatcagcaacacatccagccctgcctcttatccttttaagatacgtggtctgcatgcatgtgtgtgtctgtgtgcatgtgtgtgcctgtggatgtatgtggacaccagacaacaatctcaggtgtccttctcagaaaaaccatccaattcctttgggggcagtgtctccttttggtctggagttcatcaacaaagggagactggctagccgtggagccccaagtaccttcctgtctttatctcccctaagctaggattgcaagcacaaacagatgctaccacaccttgaattttaacatggcttttgcagatttaactcagatcctctagcccacagtcagtttaccaactgtctcccccaccttcatcacacacacacaacacacacacacacgaaatacagaaggaaagaaagaaaacaagcttaaaaataacatttattttattttaaaagatcagcactggaataccatgacagtgtgagcattagttttttatcagtcttgtgggggtaatgactgtgtgatcttgaatacaccatacaaccgtctttgggcttcagtacctcatatgaatgcagaagggttgagtgaagtacaggctggcatccttcagtgtcaggattctaaatatttctacacagaactaatagctctaccttgaggtgttaaacagagtttcttctgaacagttgctcctactaagttggttataggcagtttggcaatcttagagaagtgattgtaccaacatttgattcatctgtattgatgtcagacaggcaatgcctgcttagattaggtgttcaccatcctgccatgctaagtgtccttgggtctttacagccttccagttgagctatagccaaatctgaaatctgaaggtagagttgaaccctaataaacttgactgcaaacagaggctgtttctttagcagcataatagcagtccgcagctcccggggaggaaatgaataacgaacttgaacttagaacctagtgcgtcccttgaaagttgagcacgtcagtgagatttctccaacagttacactgacagtaaaatgttcagttcacagtgataccgttttatactgagctatggttattttcttcatccccacaatcttatttcttaaacaaaatgtttatgaaaaggaaggaaaaggtgttcactgcagtatgaagtcaatatggttctgattcagagagtaaaaaccaagatcacttcaaggactgagcctgcaacacagtataagaaaataatcttctatcaaaagctttagtgaaccctaaagacagaccaggagcagggttggctggcttccatcctgggatcagaagcacggaacacggatctgcaagctgagggaggtctacattctactcagcaatcttgtcccctttgggtccttgaaggagaggacactagaggacaggatcctaactgacaagccacagactaaggcggctgctttgcagagcacaactctggcttgctggaacgaaggagccttgccttgctgaaatccggtccgcgttttgctgagagcccagacgctgtgaataagaggagcctctgagggctggtttctgatgtcgcactcggcacgataagaatgccattgacgtcagcagagtcatcatcagggagaatggcaccccagctcttgaaaccacaccaagcaattgcagtgcttttgaaaattaaaagccggtgctggggattgggggcggggaagggaaaaggcgctgagggggnnnnnnnnnnnnnnnnnnnnnnnnnnnnnnnnnnnnnnnnnnnnnnnnnnnnnnnnnnnnnnnnnnnnnnnnnnnnnnnnnnnnnnnnnnnnnnnnnnnnnnnnnnnnnnnnnnnnnnnnnnnnnnnnnnnnnnnnnnnnnnnnnnnnnnnnnnnnnnnnnnnnnnnnnnnnnnnnnnnnnnnnnnnnnnnnnnnnnnnnnnnnnnnnnnnnnnnnnnnnnnnnnnnnnnnnnnnnnnnnnnnnnnnnnnnnnnnnnnnnnnnnnnnnnnnnnnnnnnnnnnnnnnnnnnnnnnnnnnnnnnnnnnnnnnnnnnnnnnnnnnnnnnnnnnnnnnnnnnnnnnnnnnnnnnnnnnnnnnnnnnnncacacagacacacacacacacacacacacacacagacacacacacacacacagacacacacacacacacacagacacacacacacacagacacacacacacacacacacacacacacactattcagagcttttgagtgtctgactgaaaaaaactgacaaaagttgaaggtttggaaagggtccgcgctaggctgtgtgatgtcagcttccagaggcagtcctaagaacatcacctcacgctgaattcaaaggccacctagtctggaaaaggtcttggagttaggcagactttgaaaacatttttttttttttaaatggggaaatgtgactcttagaaatttcccatttaacctaatcctttttctttgcctctaccgattgtaggcaggctccaccctcacctcccctagcactaagagaaggagatagcatgggtttgatgatatcagcagccccgggccacatgctttattttacagcattgattggcagcttcccaagtccatgggatcttttgctgacctgcttttcagatccgtatctcccagtcacaccagaaagaatcccttctgagcctgggaaatgtgagcctcggaaacaaaagggcatttgcactaaagcagaatctggcagaaagcatgggtttaataaattgcatcatgtgaaagttccctgtcagatgcactggcagcagagaaacaggcacacgcatgcgggaagggagctcgctcctcatccaaagactgagttccttttgaaaaggaagacgcgataaacagcatctctctccaaaatatacattatacatgcataatagagagagcagcgtgtggaacatgtacatctagcctgtctttcctgtgagagcagaaagagagagagctaagtacccatagagggatttgggctgtgtgttatcaaaggatatcatatatctagaacttgggtcatttggtttagtttttgttttattttggtttttcgctttgttttgtctttttaaaaaatcctactagtacgtacacttaatagtgggattgtttttcttctctcctttccttttgccctgactctttccttcttttccttctgctcttcctcctttttctttccttccctcttcccctaaaaatatgaaaaaaagataatcccaaagcttttagtatgtgacagaggcatagacatgtggttctcaactgtgggtcacgacccctttgaggagacaaaggacccttttatagggctgcctaagaccgttggaaaaaaacatatttacattacaattcataacaataacaagactatagttatgaggtggcaactaacataatttgggggggggaggggtcaccacaacatgagaaactaaattaaaggatcgcagcatgaagaaggttgagaaccattgctcttagactgagcctcagaagatcagagacctgggtcataagcatataaaaggatgtgcttgtatattgtggcaatgaagtgaggggggcagagccagaacttctatacaatactccttaccttctacaaggatagaaggcacaacgtaagtgttaactactatgtccattcccttcagaccatttctccctttaatcttgaccaaagctgcattgcaagctttctgacctgccttcctgggttgatcctgatatctgtgcctgtcaccctagcattctgccctcctgctcctgtctatgacactcagctatccctcaatgaaacagtctcctctagaagaaagcagtggcattctttctctggtctttttgactttgccaccttcctggctcaggcaccacccggaccatacttacagggtcgcattctggtaccagggtgagctgccctttgcctcaggcagtggagcaggaagcttggagccccccagagtctggatgtgtttaggatcaggctcaaatgcttggaacactaatttgcaacaggaaatgctggtgggctggttgagggacaggaattagcaaatcgtcttggcagtcaactgtaggaggaagccatgtctggagatcctttaggaaatagatgcataatagtaaaaatccttttcaggtgtgttaatttcctttgtggacagaaataccctggacttcgggtttgtgatattccatatttattattattattattattattactattattattattttggtctctcttttccctaaggtttggctttacttcttggggaacacttaaagatatacatagtgaatttgattattgacagtactctaagcccggcttaataagccatggaacaaaatagctcaagctcctagagtgactgtaagccagccctggcagcactgagagcaccgcggctttggctacacatatctgtagtacgagcctttcctcagtatttcaattctgcagcagaacctcggaagcaccttagttcttcacacagtaggcaaaagattttggagaaccaagtagaaatgttttactaaaaatgcaaggataagagccccctccccctcaaccccatccccagcctctctgttaatacataaagaagtagaaacctagaaatctgttacatggacttacacaacacactttgggggcagagccagaagctgtgtttacaataagaaagttgttttccctgatctaggtttacatggttattctatgcttttcctgggttcgagggtagaatattggttggctcagagattgtactgtctaggctgaccgtcaacttgattcaagctagagtcgtcagaggagggagcctctgtaagattcctgccagagggcattttcttaattagtgactgaaagggcaccagtccattgtgggtggtgccattcctctggactggtgattctgagttctataagaaagcaggctatgcaagcaggctgagcaagcctgtaagcagcacccctccatggtctctgcatcagcgtgtgctccaggttcctgccctgcttgcgttcctgtactaacgtccttagataatggtgaggaaacataagctcaataagtccttccctccccaacttccagtttttggttctgctgtttcatcacagcaatagaaaccctaacagaaattatggagacactggaaagcagtatacagactatgttattgcctacttatactatacaaatgagaaagccaatactttctcaaataacttgccgaaggtcactgcttattatgaacagtaaagtcaagactgcaagcccaagtctttggtcttgaatttctgggctctaagtttcttcattaatgaactacgtccaatgggcctctgtacccagaatttctagctttacaacaacatttcctgaataggtagtattagaaagcacattgactggagtagagctttagaaatgaaggtaaaacccttggttcaatgctaatactaagaccgcccatgtaaaaagcaggaaaccgggcagctaatgtttttcaatggattggaaaggccacacatattgggatgaatagtttggtgacaagaaataacagaaagagagagttggaagaatgcccccgggatgtaggcacacagtggattataagggagaaatgaaggttaccttcaaagaggtttttggcttttttttcaaagcctgagttgacagatagtaaatatcaaagatggattggttggaaaaaaattaagcagacaatgctctggaggtgattttaggatcaacctcactattggtcattgtcaaagagaaaagagtgtgtgtgatggagagatggagtccttcacctaaggcacagaaccgggctaaatcgatacatacttttgagaatgcccttcctgattgagctttagaaattaggtgcaaggctaatgatgggaccaaagaaagcatctacttgccttagaaaaggaatatctagaaaataggccaaagggaagaacataaaatttgaagcaccttactgtatgacgcaacggcagataaactaagtcacagttccaatgtgcataagggaggtttgctgtagccataagggacactctgaagaaagtgcttcttgccagcctgggctgcccaaggcaaagaagaggcctccagacagttccagagatcagatatacatgcgatgcatgagaaacaaccctgaagttcaacatgctagtctagacgttccaggacagggtggagcctggattagaaactccctgtcctctagaaggactagaagagttggaagaatatgctttctattgcactctgcactgggcaccaggagatacgatcagctgttagagatctgcaagttaatttgtattaccggtacatgcccatgctggaattcgagtttcttaagaggattacttagtcttggcagtatttaaatttatgctagagagctatagtggggacatgcaaaagtatgtttagtgtaaaaagccagacagttgattgtgtagtgcgctggtaagccaatttttctcatcactccctctccgcgttcccagacaaaactaggcaaaaaaaaaaaaaaaaaaaaaaaaaatctgacctgtgttgtatgcttattgccataatatattctccctgtgactgaggtcacactttgctctaatagctttttggtttttggttttttttttaaccaaattcttgaaggtttaacagttgacaagatctagttctggtgtgctacatcagcaattctatacttctcagtgacaaagaacgttgcatagtatttgagcttatgaaggtagcggttatctactcaatgcctgccagcctgcacaagattgattggctctgccaaccttccatcatggactagggaagggcccatcaggccccacccctcactgagggactgtgggtagctaccattggttaaggaagggagtagtgtagtcattggtaagctgccctcactccagtaaataacgttcccacccatgctgaagtaagaaatctccttaaactgactgagcaggccacacagaaaaggagaagacagggaaagaggagaggaacttgccaaaaaggttctagcaggagaggtggggctgtgagagaggagggggcatacaaacaagggaaaatccatcacgtatacaaatatcacatagtggattttgttttttagggaaagagctgaggtgtagctcagggaagaaggctctcagagtgtgtgaagggccccagattatttacagcaccataagaatgaggaggaaaaggaagcgatctgtaagtactagctggcttactcagaaagcgcttgaattaggacatcagaataaacccttaaaagagacaaatagagccgggcggtggtggcacacgcctttaataccagcactcgggaggcagaggcaggtggatttctgagttcgaggccagcctggtctacaaagtgagttccaggacagccagggctatacagagaaaccttgtctcaaaaaacaaaaagagggagagagagagagagagagagagagagagagagagagaatagaagcaagtaccccaaacgtgaaataaaataccaagtcatgcagtctgggggcaggaggtccaagtatgcgaacggggatgtctggggtggggggcggtcattgctaacttatgccgtgaaagctatggacagtcacaccaagatgttttgaactccgatgaacaaaacagaattttagcaagtatatactcttttaaagaaaacatgtctaataataagttgaataattaatagcagtgagaccctggaattgaagaattggggcgataaatctgccttttattagtgagaataattccagtcagcaacaaggttggaattttgtaacttctgtcttaagaaattgtagcctcgagtattgggtaaaaggcaccaggaaacaaagaaacaataatggctaaatacaaattaaaaaacaaaatagttcagaggaatcagcacacagagccactgggttttcactgtaaagtggatgtcactggtattcagttttaccattataaaggtaaataatgataactatattgttattagctgactattgttatttggataaaatcaggtacattcaacctcttattttgtggaaattgagcttttaattgaacttttaaacactcatttaaaagccaaaacttggatcaggtcagtctcagcataaaatataaaacccttctccagtttgtttgttttggtttttaaccatttactctgttagacacacacacacacacacacacacacacacacacacacacacacaagcacatacaaatggtcctcactgttccttgtgtaagttaaggtctccagtcatcctcactagctcggccctgcagcactgggtgatgcaaccttgcccacacttagggactcttcttattgacttctaaacctcagaagggtgtttcagtatgcagccttgcagctcagcaacagggcaggttttattgcagtgaggctgacatttgaaagcaccagggtagaagacggaagatgttatgatacatgtaggtcgatgctcagggaacatgttctcaagtgttcctggcagctgttcttttcagaacctgtctgtgcatgtctgagctgggtaagtttggtatgtcagtcagaagcaagcaagcaaatataacaacaataacaaaaacaaccacgaaagccagtttgtagcctgaccatacaatataaatggcatacatcattacttctcaaaaggttaaggcctaaactttctaaatattatctcttcttagccactcttgatagtcgtatagtgctttgaaggcattttagaaaaggtctttttttttttttttttttttttttgagcagaggtggggatggcggtgggggggttggaggtggggttcgtttaagcaaaaacaggtcattacactacagcctggtaccacaaatgctggaagcaagctgctgatgtttttggacgaaagtttacattttatttcctatattcatacccacattttggctgtatacttatcagtcaggagtatgcagtaagcaccaattctctgaaatgagaaatagcatgtcaggatattgtcgaaactgtgctattggaaatctacacagaatcaaaattattacaaagtaattttaaaactaatattaattatttagtcaaccatagatgaggaccctggcaaaattgcccaacaaagtatgtaggttctgtgggaagcagtcagccttggtaaataagctgaggctgctccatcagtctttccttgggacacatgtcttaggttgattaaaatggtatattatgtagatcttattattaagagtagtgtacagcctagctatcagaaatgaagtcctcaagtccactaatgtcatttttctcttgggacattgatgaacatcaggaaagaagtgaatgagagctctgagtgcccaaagtagatattcctaacatcaaccgcttaaaaaaaaattcacatcatcacccacacaaatgtttgtctgtgttttagtgatgattcatacaagcttggctgtgtggctccaatgtttgtatacatctaggccttggcttatgaacatttttatttcaaaatacatttcttcaaaatctgtggtttaatgaaccgtcctacggcgttaatttagccaattatgtctaacgtttgtgtcgctgttgccttttctctttgctctctccttaaacaagcagagattgaaagaggtggtgtgggggccggtatgcaacatcacacatgtagatacactctggagaactgtctagtcagtgttttgattgctatgaagggacaccatgaccgtagccactcttctaaaggaaagctttgaactggggctggcttacagtccagaggtttagttcattgtcatcatgccaggaagcatagtggcatacaggcagacatggtgctggagaaagacccaagaggtctatatctggattggcagtcagcaggaagagggagagagacgctgggtctggcttgagcatttgaaatctcaaaaaccacgccaaagagacacattttctccaacaaggccacacttatacttactaatagtgctactccctatgaacctatggggcctcttttcttctcctcccctcccctctcctccctgggctcttctgaggatgactgtcccctcagtgtctcctattgtgaactactctaatacaggagtagtcacttgtgagaatcccaattcatggctgagacctcccttttcaaaagctggctgtttgagtgtgtcctccacctacattttacctctctaaatccaaagagaatttggcagaaacaagggccacaatttgcgaaaaccaaaaggctgtggagtgtccctgatctggctgaatctcttggctgggtaggtggagcgaggagcagaacaaatagtgaaaaaaactgtgcaaccaagttctcatatatgcaagagaaactggggcgttctctgagtcaaaaatgtactaagcccaggatatacggtgggaggcacaagactcaatgccagctcttacgaggcaggggcagatttatcttgnnnnnnnnnnnnnnnnnnnncctcccctcccctcctcttctcttctattctcttctttccttccctccctcccttcctcatttcttccttccttccttccttccttccttccttccttccttccttcttttttctttctttttgattttggttgttgctttgttttcttttttgagacaaggtttctctgtgcaacccaaactatcttggaattcactttgtagaccaggatgaccttgaactcacagagatccacctacctctgcttcctgagtgataggattcaaggaatgtggcaccatgcctgaggaatccagaagagaattccagtttatgaagtaaccatctgagtgtgtgtgtatgtatatatgcatgtatacatgtatgtgtatgtatgtatgtatgtatgttatccctctgcccatcactttactgaggctcactgattcctttagagttctgagcaataattgtagcctgaagtgtccattttgacatgccacttgccccttttcagaacttctttcttactcttcttctaagtcacatgacttagcccagctgcactgtagattttcaaggtcattagacaggttcgccttaagacctcaacattccacagtacacttccctttaaggtctcattccaaatctcttgatttccttgaatctttgttcatatctcatttcatccaggaggccatcatgaccatctaatttttaacttcattctgcattatcctactcctagtttctgcttttacagttctcctgtgttttacatgtaatttcttataacacataatttactatatttagtatatattatctttttctctaactacactgtgaacagctcctggtcaatgaactttgttttgacggtcaggaaggaaggaaggaaggaaggaaaggaaggaaggaaggaaggaaggaaggaggggaaagaaaggaaggaagagagagaaaggaagaaagacaattgatagatagatgatatagatagatggtatatagataaattcaaggtagatatgtatatgatacagatatagagatggatcagtacttatttttaggtcgggtctctatctatctatctatctatctatctatctatctatctatctatctacctatctatctatctgattgacctggaattcactaggtagagttggctgaacttgaactcaagataaatctgcccctgcctcgtaagagctggcattgagtcttgtgcctcccaccgtatatcctgggcttagtacatttttgactcagagaacgccccagtttctcttgcatatatgagaacttggttgcacagtttttttcactatttgttctgctcctcgctccacctacccagccaagagattcagccagatcagggacactccacagccttttggttttcgcaaattgtggcccttgtttctgccaaattctctttggatttagagaggtaaaatgtaggtggaggacacactcaaacagccagcttttgaaaagggaggtctcagccatgaattgggattctcacaagtgactactcctgtattagagtagttcacaataggagacactgaggggacagtcatcctcagaagagcccatgcaagagtgggttctaaggggctttccattatctctttagatgcctactagatgttcacagagactgagcttgcattttgctgacaaacttcacatttctgggttgatgcttacatagctgtatcttggaataaagcaaattgaaaagggttaaaatctgtaggaactatctcccctgtagcccacaggaaagtcctctttttagaggaaagggtttgagggaggtcaggagctgagcatcagatagagaaaaaacaccaagtcctaggaaacagcaacggtgtcagagcatggcctgttccttgtctagttcttctgttaaagaacacaaacttcccatacctgttttgtaaatttaatgaatattttaatatagatcagatcatcctgggtaaaaaaaaaaaaaaaaaccattgacatccctagaatcagactgtgccatacctcagccctgctgtttactagttgtgagaccatgtgcctcttaatttcagttaaacgtgagcgaggtcaaacaggatagatcaagtgccaacactggtcctggcatatttcatggaacattagaccagcttatgggcaccatcactgggtgatgacccagtaggattgagtacgatccaatagtccttcctgctgaccattcttacctcgagctttccctgacatagcatttgttttaatacccatacagaagctgtttaggaaaaagggaaaatttaaaatctatctattaaaatctatctatctatctatctatctatctatctatctatctatctatcatctatctcacagtttgaagtatgtataggtatcatcaaattggaaagtcatgaagacaggagcttaaggaattaagccatctgtagtaaagaaacagtgaggcagttgttggtggcacacacctttaatcccagcactcaggtagaggcaggcagatcagcctggtctaaagatcaagttccaggacagccagtgctacacagagaaaccttgtgctgggctcatttttcctttgtaatgagatagggatgtgattctagaggatggtgcgacccacagtgggcaggcaggtcttcccatttcagttggcttatccagatcacaggcatgctgagctaagtttttctagactagatctcatctagttgacaatagagagtaatcatccctgagcaaatccatttaaatgtcccaacgacagtgaagtctccctccaagagcttctcagagctccagacgtttctttatcagcattattaaaattaattcatatttttgcctatcttattattgttatttttaaattttaaattaatgtcttggtaatgagagggaactttgtttactttcctgacctctgtgtccaaagttttggtactttttaattgagggtcataaactattcatgcattaagataatcaattttagccagaaataagcaaagaagaaactgaatacagtaggaaagggaaagagcatcacacataaggaattattaagtagaactgctatttgtttcagtatggatgtgcctatataatacacacacacacatgcacagataccatacccacatacacacccatgcagaatatgtgtcaagtggcctaaaactacagctagcaccaaactctatgatatatgtgtgtgtgtgtgtgtgtgtgtgtgtgtattaataagagattagccacaataactattaatgaaaagaacagttataacaatgtactgagataaaagttatgtaaaagttatgcatggcatttttaccatcttgaacatgggctttcctttgggggggttgattttaaatttctgcttaccccctttttttcctctccccacgttcctcccctgactctgttatggctgtccttggatgatttcagtgttccttgttttgtctctgtgtttgtgtcgtgtgagtttagaagtgtatctatttcatcttggtgtccagcttggtgtccatttatcaacacagtccctagtcatcttctggattgccttggaatctgccatagcaaccccctttcatccctgctttatcacctttgctcttctctagaaagtgaacaaattcatttcaattcacttgagtagggctttatcaacattgctgatcttttcaaagagtccaacccttcatgtgggtgattctgcgattgttcctttggtttctcagtttttgtcttatattttattattttttttgacatctactaagtttagttttgtctttatctaatgccttatggtacataattagattattttcttaatctctgtgcacacacacacatacgcgcacacacacacgcagagactctgttttctaaggtgtattttactattgatttctaatctttttccactgtagtctgaaagaacataagaaattaagaaattatttgaattagacgattattaaggcttactttatggtataaaatgtgatagattttagagacacttttttttttatcttatttttatttttttcttgtttagagacacttcagtgtgctgctaagaacaatgcactctgttgcctgggatattctgtaaatacccgttaagctcagttgatatttaacataatttagttctgaaatttctttacagaattttagtttggaagacttatccaaatatataagtaggttattgaagttttatgatattattttttattcttttaattttagtatcttcagatccccaaatacaatgcataaataattatttgtatctaccctttactgattttccccttcattatatctgcactgcccctctgactagtttttgtttggagtcaactttatcccatataaaaaccatcttgccagctggtttatgatttctgtttcttggttggtagatttccacacgttgacacttagacgatgttagacgtctttgcccaataaaaggactgcatggagaaagtcaatggctggaccttgtttatgagcccagtcatttagtccgtgtcttttctctgttctgtgagatccatttgcacttaaggttgttactgggagaatttgggtattgcttccgatttttttcgattgatgctctgactggtatttcttctcttcctccactccctgccgttattcctagctttcagtgttggacatgcttggctctgtccaggcgtctctgtttctctggtcctctcacaagatgctgtcttatgttctcatgaatgcgggcgccttcttccacatgctgttttctttgagacgtgtctgcagtgccggccttcatcttatgaattggcttaatctgggtctgcctttgaatgctctcagttcatcaccagttgtaagcgcttactttgctgggtgtagcaattttaataggcagttacttgcattctgggcttgaaagattatcagtgcatgcttttccagcttttagtgccagtgaaggaactgatactactcaatgcttctgcacttgcatgttactttgtgtgttttcttgcaaatgttagtatttttcatacatacatatacacatatcacacacatatctatacacacacttcactgttatgttatgttatggaaaggttcttctttggttatgtctattgacattctcattgtctcttgtctttcatgtgtgtttcatttttgtatgtttggagaattttatactataatttcagagagagtcttgctatttatagtcagcccaagccgaactgacccttccaactttcctaccttggtcttctaagaactgggattataggcaggtgtcaccatgcctcatatctgtgacttttcatttattataatcaagccacaatagattgggggtagctggaacatcataggatgtggtactacttccctgaatgtctctaaatttgttaatattttataaagctcattaaaaaaatactgtaatggatcttcttcaaacctgaagctaatgtccatttgcctttagacactagcccttttcttgatcttcctctttttggctattaccccataatcttgggcatgcatgtgcccgcacatgcacacgcgcacacacaaatgctgctaatcaatctcaagttgtagtttttaatccactcactatcaatgcaaaatggaagctagagtggttttttcccccctgaagtttattactttttacaataacttttatttgtaaaaataaaaaggtaattatataatgaagtaactgctctcaaatttgaggatataaagacttgttaccaaattacttcagagaaaaaaattcagcatgtaccaaacagtaaacataaaacaataccactacaaccaccaaaaaaaccaaaccacaccaaaccaaaccaaacaaacccccccaaaacagaattcggtagccccagttactcacaacagacccagcaaaataagattacccacgcacccccatgcaatgcagcatatgcaccaagccgtcttctgcttcagcccttgactttcatcttggggagtctgaggaatttatggcttggtgcatttgatgtggcacagttccacatgtgagggacggcgattcggatagcgcgacagaagtacgtgccaagaataattggcttctgtattgcggaacagctcaaatactatgtgtatcacaggatgtaatttgggtgtacaaaatgcccagagttcaaagtgctctactcctctgcagtggcaaactgagcttcctgttggctgactccttgggtttgcagtaaacaagctgggcgcacatagaaagaacacatccatttagtaagagccttcacttggtccggcagctgccgcacattagtgctgagatctcttctccccggcttcttccctctcctatttgcctctcatttcttctctttcctacttttcacctttcctccctcccttcctttccgtcttcccttcttttctctcttctattgaatacgatagtttcctttcttcacttctaccctgtatgagcattctcaagcaggtttcctgcttgaaaacccatgaagctcagataaaaaacacgtgacctgccccccacccccaccccttaagctttgatggagcaagcttgggaaggaataggtgagcttgtatttttaactggtaaccaaagtgaatctctacgcaggctactggggcacacgtgatcacgtgtaaaagctttggcgtaagatgactgtggttttcaagacagctctgtgactttgaggaagtcaccttggaattcctgagctctgattttcagtttataaaaggggggaggactgcctaatggtcttgctgcgagggcttcatgaaacagcatacgttcagcatccaacaaatgtcagtttccttacctcatcacagtgcataactatggaagagtcaatttggaataattccaaagtaaaataaaagtaacgaaattggcaaaacttaattcggtagacatttttgaagttctataaagttaagaactccatgctacatgattcaattatatacgtctgtgtacatatgatgaacattactattcccgtgtaacagattcggggattaaatatttactgtggcaggtccagctactcattagaagccccgtctgataatctttctattccacccacacctgtgtcctgttttgaacactctctattctccatgatgatggctgtaatggtagaaagtagagttcgttttcaagtaattcctttgactcaaatcaccaaaattatctatttctgtgaaaaggctttcacgagcatgaattatctatttcatgaaaattagtattaaaggacattggttcttaagctcaaatgtgccgaggccagatgagaattataaagggagacgctgtggactgtaaggtctggggaccatgggcagatggcagaagcagcctgttccatggaggcagcttctgattggctgaaggtagggctaattgagcagagagcgtggttccctttgtcaaacctttctttcttctttctctttgagaaaagaaatgtgaaatttaatgtgagctttcccaatttttaaacaatgtgtgtgagccaaatagtccacatctgtgggccagctttggcttaaggactgccagttggcaattttgacctaattacccttaattcttcacttcttttgacctgataaattgtccacttaagtagcttagacatgtaatagaccctctgagcaattgtacttggctccctaggtttagaaagttggttttctcagaacccaattagaggggtaccattgcagacacccagaacccaagaacatccaagtacaagatcaccaagtactttgcagtgagaaggctactgagaaatgtcctatttgtctgttgggttcactttcttcccatcactcagccactgtggaaacagaatcccagttagcaactgctttggcatgcatggagtcagaagccaggaacttaatgactctgacgtgtttccctctattatgttttgagactcctcccccccccccggctgtaatgatggggtaccccacgtctcccatatatgctaaacacactggatgagagttccatgggttctactgtcacctgcagctgacagcttacatcccattggaggggataatgctattgtctatgtcagatttaatatcacacagagttgtaagttcacatctgatcctggggtttcgacctccgtgcttgggcgatttccagattatctgcatttgcttttttaaagtagtcatttgattcaattgagaagtctgattactaagttcattttgtcaaattcaagatggcattgattgtaagctgcatctgggttttagaggcacaggcaggacaggcatgcattctaattgtattataggaaactcaactagatgggtacattttcatgttaatactgagcattcccttatatttaaataaacatagggtggggaaaaaaaaccaaccaaacaacaccatggctgactttgtcatttaattgaaacgttattcttgtattcatccccaaatatgactctggaatgtcaaatatttacctctcaatgaatctcttttttgtcttattggattggttgagcaaagctttccttctttctttttgaatacttgatcattagagtggctatgcccttgatctgtgaggaaagggcacttaggaccagagtttcaattggcctaacctcaccttgtccttataattagccctaaagtaaaagaatttgggggaaatgacccttacatagtacaataagcattttcatgaatatgagagtaaccacacagggagagatcctaaatctctacttccctgggactttattattgaaaatcctgcaggaggtttaagcatgtattatttgtacaaaggtcatttagtgggctcccacagttatgtaaatattgtacctatagtcatacaacaaaggggataaaaggaactgccctctgatgacgtcattagggagagaggcaaatcacccaagaaaggcaggagttttgggaccagagactaaacccttcctcaacgtttggtctgctttagtgataaggggatgatgccattagcatgtattcagggaataatccatgctattatctagagagcatagtgatgtgacaatccctagatggcataatgctgtggtgggggtagggctggggcaagtgggaccccagctcagtgaatgcctctaactatgctgagcaagactgatttgtatggaataactgatttccatcaaaagatctgcaatattgaagcccagggttgtgtcatcctagacgtctgggagacctttgccatggacagggaaatatgcagatagtccatgacaaacacagagaaacttgtgtgctaattggccattctttcacctccacaagtttagaatgaaattatattttgacagctgaacattctctgaggttttgagacactttggagagagagtttccagggagagagacaggatttcctacagaatgggtaactgtaggccttaaagagtaactgaaagggaggaaagagatatgataatatttatatctaaggattatctagccactgtggacatagaatcagataacataaaatctataatggcaagcagttagatgctcaataatgattgaagattatttagattggtgtcacacacactgatgagcaccctctcaccaaatcatcagctggtccaagtgcatcagatgcttggagtgggagtgaacacaattgtgagctcgggacactccaaactccagagagcaggagcaagagtgggagcatgcagagagttaacatcaagtttgcagaatttcccatggataataattaacttctaccttggagcctatatgagctgttataaacaatgaataatcttggtgtcacacatgcacacacacacacacacacacacacacacagcaaaaaatcactcatcaaggcaattctttttgcaaaaagaatgtaccaaaacccaaactgggctagcagacaatcagagccaacatcactcttgtctttagtccctgatgtaagtggagactcaaagtccagcacatcccaccggtgggaaccttatgatctgatgaagttggctcatgagtgcacagggaagttggctcatgagtgcacaagggaagggggaaccatcaggaaataggagcccattgatttaaataagacaaaacaaaacacaaaaccatttctcacatggaacctctccataaaggaaagaaagaagggcaattgggtggaggttatcagcatattcaaaaaagtcagacctgtggaaagagaggtaactgtatcagtttatggatattgtataatctataaaatacaaatgggagatggtcaggaaaagagtaagtgtgagcatagatcaaggcacatctaagtttatacatacatacatacatacatacatatatatatatgtatatatatacatatatacatatatatatcaaaaaggtataataatagtttgctgtgttgggccatggtgtgcacatttctaatcccagcacttagggagtagacagagccaggcagagctctgtgagttctagatcaacctgagctacagagttccatgcagcacaggctgcacagagaaaccctgcctcaacaaaacaagcaaacaggtttgctatgatgtgcgtttcttttcttttcttttcttttcttttcttttcttttcttttcttttcttttcttttcttttcttttcttttcttttcttttttcttttgagacagggtttctctgtgtagccctggctgtcctggaactcactttgtagatcaggctggccttgaactcagaaatccgcctgcctctgcctcccgagtgctgggattaaaagcgtgcaccaccaatgcccggccttgatgtgggtttctgagatcatttagtttatctcagttaaaacttggtggggttgagagagaagaaggaaccactggaaggaaggaaagtgctttggaatgctgcaagcattgtgaagaaacctggaagaatcaacacacgttgggcatcgtgcaaaataaacatactgttggccttgccttcaagaagtttcaaacggaattgaagtaacataacgaacagagcccggtagtgtagaacgacatctatcatgtaagtcgtgactggggactgtagttggctgagaaggttcctggtaggagcatcacagcaatcgccaaccataatcttagagaagatgaagaagatgagatcaatgcccaaagcatcctttgtgtaatgatgtgcacagttttgagaatgtcagattcaacacgcaccataataacatggtgtttgtgtttgaaaggacaacatcacaaaaaagacttagagtcactcatgcaattcaagtggcagtttttgccatgagtgcagaacactctgttcttctgcaaacggcaactcttattgtcacagtatccaggacggctctcatttgcctctcattttgttggtaatttggtggccctgcaaacaggacttgtggcaaatatgttgattctcactttatagccaaagaagctggatatcacagcttgggagcaagttatgactgtcagacttgaagtgtgagtcacagggcacaacccaggtaaagatgtgttattattgatgttggttagctacatttcctgggctgacctcatccaagtttgctttgtcactactagggttttcttaagagatcaaaggtctagaatttgtttgcgcatctttgactaacatctttgatttctagttttgaggagagctcttaatatttctgctcttcctttttgtcttctatattagcagatagaaatcccatacaattttgagatatcaggcctatacttacaaaaactgttggtgtcgttgactatccttaacagacttattcacttggcaaccaaggggattaagattaccatgtaaatcttaattatttacgtagcatctactcaatcaaaagattacatcccgcagactcccttaaaggggaatatagacagtgaaatggaagcagaaggggttctggcctgagggaatttatacctttgtgttctttgtgattttggcttggaagtgttcaaatgatggctggagcatcagtagctatcttaaaaatcacaatgaacttgagacggaacacatccattaaaacgatggaccgaagcaataataaaatcctaggacactggtaaacataatgccatcattccaagcattatctgttcctatattttattatcatgaaacagcagtcaacatctctcatcttgaagcctctacttgcctcttcatttgctctctaatagattgaaagcagattatagttatgtattttttcaatcactagattattttttctcattttattgtgggagatgatagcctaatatctgtcctagaaactttataatgctatcggggtttcaacataatttaccagatgtaaattagctagtaaacatatggaaacacaatcacaaaatgtgaagaactgctaatggctagtagacattggaaggagcaaattgaagaaagtttgttaataaaggcaaccatagcgttttttttaagcattgaatttggaaatctggaagctaaaaccatattaatactgtgtagcacattcatgttttgtaactagatggaaactccagcttcccagggcacctgtcctttgatcttctcatctgtcgctgcaacatgattataagggttactgggccgttctcagcctgagttgttttcatgactgcattttctggtagaggaagaagagtcattaaaggatatcattaagatgagagacactcggctggtaattgaccttcagtgaaagtagtcccatctggaagattttcatcagcaagcctttatcagtgtctttggcttctcaggagatccccctgtactttcctttaaaacaaataaagccaaactaaaaacaaaccagctaaatacttgtaagtctgtgtgtataagctttaggagaaaagaaattaagaaagaatttttaaaacaatttaattttgtatatgaatgtcctatttgcatgtatgcttgcataacagaagaggggccatcagatcccagtatagatggttgtgagccaccatgtgctttctgggaattgaactcaggacctctcaaagagcagccagtactcttaacctctgagccatctctccagcccaagtaataagttctctccttaggtaattctacagttcttactgagcctctccatgagatgttgtggtatttacctagaggtgtgctttctttacgactctgtgtgtttagaatggagttggtagggggaagaggggacttgtgcatcagggtacacatggacttaaaaagcttctgtctctgcaggtgggagtcaggccagcgctgatctgaaacttcacattatgggtttctagagcgcagtgtctgtttgcaggaagacagacatttctgtggttttcacaaaggcactaatgtgacatattaccagtcaaaatacattacccaagtcactgtgcaccgctgtgctctttggccttcagaagaactgcctttcccccaacatgtctctgtctcgtgtttggttgggtttttctttttatgtgtgttgataaacatagccgtttgtgattttctaggtctgtatcagcctaaagaaaaggtggaaaaaatgtaaatcaaggtgtcgttctcaaatgggaggaaagcaaatgcttggcttccattagaacctgttgccacagaaggagaattacagtggggcatttcagtaagtcagcaactgcgtcttgctccaagacaaactgagcacggtgcgctcagcttcagcagtctcatggcgcacgcgcttgaactttaccactggcaaacattttatataggtcaaggtggttaccggagaaagatgagtagtgccaaaggaggaaaacccagttcacttatgaccaatggaaccacggcaagctccccaccgctttattcacaacctagttcctaacactttgtttccccgggaacagattggttagcgcttccttgcgtgggtaccagtatcacagacgcacacagattctttcatctaaaaccgaaatggtacatagctgcagagtcctcagttccttccaggataacctgcccagtgctttggaaagggaggctcagccattgcgagaaaaatgaagaagacttcaaggaaaactcatcgagcctcactaggaagagctggcaacccctgaaataccctattcagtacaatggttcacgccgaatttcagtttagtttctgcttctggaaacttcttagagcttattataactatttcatactgatctattagtatccatcttcgctttcgcactgtggactggaaagtaaaggagaaagaagtcgattgttaacaataattggaacgtcttttgtaaccaaagggagggacatgctttcttcattttcctttgcccggtcgtcagggtgctatgaggagcactcagagcagtctggaaattatatcaggagagagctgtcactattgccaatcaggtagccagaaataatgagagggtcagaggaaatgtctaaggtaaattttcttggcactcacagctatttctcttatttctcagagatccatagctcactgttgcctaagttggtctgctaggtattggatagtgagatggtaccactgaggaagagaatnnnnnnnnnnnnnnnnnnnnnnnnnnnnnnnnnnnnnnnnnnnnnnnnnnnnnnnnnnnnnnnnnnnnnnnnnnnnnnnnnnnnnnnnnnnnnnnnnnnnnnnnnnnnnnnnnnnnnnnnnnnnnnnnnnnnnnnnnnnnnnnnnnnnnnnnnnnnnnnnnnnnnnnnnnnnnnnnnnnnnnnnnnnnnnnnnnnnnnnnnnnnnnnnnnnnnnnnnnnnnnnnnnnnnnnnnnnnnnnnnnnnnnnnnnnnnnnnnnnnnnnnnnnnnnnnnnnnnnnnnnnnnnnnnnnnnnnnnnnnnnnnnnnnnnnnnnnnnnnnnnnnnnnnnnnnnnnnnnnnnnnnnnnnnnnnnnnnnnnnnnnnnnnnnnnnnnnnnnnnnnnnnnnnnnnnnnnnnnnnnnnnnnnnnnnnnnnnnnnnnnnnnnnnnnnnnnnnnnnnnnnnnnnnnnnnnnnnnnnnnnnnnnnnnnnnnnnnnnnnnnnnnnnnnnnnnnnnnnnnnnnnnnnnnnnnnnnnnnnnnnnnnnnnnnnnnnnnnnnnnnnnnnnnnnnnnnnnnnnnnnnnnnnnnnnnnnnnnnnnnnnnnnnnnnnnnnnnnnnnnnnnnnnnnnnnnnnnnnnnnnnnnnnnnnnnnnnnnnnnnnnnnnnnnnnnnnnnnnnnnnnnnnnnnnnnnnnnnnnnnnnnnnnnnnnnnnnnnnnnnnnnnnnnnnnnnnnnnnnnnnnnnnnnnnnnnnnnnnnnnnnnnnnnnnnnnnnnnnnnnnnnnnnnnnnnnnnnnnnnnnnnnnnnnnnnnnnnnnnnnnnnnnnnnnnnnnnnnnnnnnnnnnnnnnnnnnnnnnnnnnnnnnnnnnnnnnnnnnnnnnnnnnnnnnnnnnnnnnnnnnnnnnnnnnnnnnnnnnnnnnnnnnnnnnnnnnnnnnnnnnnnnnnnnnnnnnnnnnnnnnnnnnnnnnnnnnnnnnnnnnnnnnnnnnnnnnnnnnnnnnnnnnnnnnnnnnnnnnnnnnnnnnnnnnnnnnnnnnnnnnnnnnnnnnnnnnnnnnnnnnnnnnnnnnnnnnnnnnnnnnnnnnnnnnnnnnnnnnnnnnnnnnnnnnnnnnnnnnnnnnnnnnnnnnnnnnnnnnnnnnnnnnnnnnnnnnnnnnnnnnnnnnnnnnnnnnnnnnnnnnnnnnnnnnnnnnnnnnnnnnnnnnnnnnnnnnnnnnnnnnnnnnnnnnnnnnnnnnnnnnnnnnnnnnnnnnnnnnnnnnnnnnnnnnnnnnnnnnnnnnnnnnnnnnnnnnnnnnnnnnnnnnnnnnnnnnnnnnnnnnnnnnnnnnnnnnnnnnnnnnnnnnnnnnnnnnnnnnnnnnnnnnnnnnnnnnnnnnnnnnnnnnnnnnnnnnnnnnnnnnnnnnnnnnnnnnnnnnnnnnnnnnnnnnnnnnnnnnnnnnnnnnnnnnnnnnnnnnnnnnnnnnnnnnnnnnnnnnnnnnnnnnnnnnnnnnnnnnnnnnnnnnnnnnnnnnnnnnnnnnnnnnnnnnnnnnnnnnnnnnnnnnnnnnnnnnnnnnnnnnnnnnnnnnnnnnnnnnnnnnnnnnnnnnnnnnnnnnnnnnnnnnnnnnnnnnnnnnnnnnnnnnnnnnnnnnnnnnnnnnnnnnnnnnnnnnnnnnnnnnnnnnnnnnnnnnnnnnnnnnnnnnnnnnnnnnnnnnnnnnnnnnnnnnnnnnnnnnnnnnnnnnnnnnnnnnnnnnnnnnnnnnnnnnnnnnnnnnnnnnnnnnnnnnnnnnnnnnnnnnnnnnnnnnnnnnnnnnnnnnnnnnnnnnnnnnnnnnnnnnnnnnnnnnnnnnnnnnnnnnnnnnnnnnnnnnnnnnnnnnnnnnnnnnnnnnnnnnnnnnnnnnnnnnnnnnnnnnnnnnnnnnnnnnnnnnnnnnnnnnnnnnnnnnnnnnnnnnnnnnnnnnnnnnnnnnnnnnnnnnnnnnnnnnnnnnnnnnnnnnnnnnnnnnnnnnnnnnnnnnnnnnnnnnnnnnnnnnnnnnnnnnnnnnnnnnnnnnnnnnnnnnnnnnnnnnnnnnnnnnnnnnnnnnnnnnnnnnnnnnnnnnnnnnnnnnnnnnnnnnnnnnnnnnnnnnnnnnnnnnnnnnnnnnnnnnnnnnnnnnnnnnnnnnnnnnnnnnnnnnnnnnnnnnnnnnnnnnnnnnnnnnnnnnnnnnnnnnnnnnnnnnnnnnnnnnnnnnnnnnnnnnnnnnnnnnnnnnnnnnnnnnnnnnnnnnnnnnnnnnnnnnnnnnnnnnnnnnnnnnnnnnnnnnnnnnnnnnnnnnnnnnnnnnnnnnnnnnnnnnnnnnnnnnnnnnnnnnnnnnnnnnnnnnnnnnnnnnnnnnnnnnnnnnnnnnnnnnnnnnnnnnnnnnnnnnnnnnnnnnnnnnnnnnnnnnnnnnnnnnnnnnnnnnnnnnnnnnnnnnnnnnnnnnnnnnnnnnnnnnnnnnnnnnnnnnnnnnnnnnnnnnnnnnnnnnnnnnnnnnnnnnnnnnnnnnnnnnnnnnnnnnnnnnnnnnnnnnnnnnnnnnnnnnnnnnnnnnnnnnnnnnnnnnnnnnnnnnnnnnnnnnnnnnnnnnnnnnnnnnnnnnnnnnnnnnnnnnnnnnnnnnnnnnnnnnnnnnnnnnnnnnnnnnnnnnnnnnnnnnnnnnnnnnnnnnnnnnnnnnnnnnnnnnnnnnnnnnnnnnnnnnnnnnnnnnnnnnnnnnnnnnnnnnnnnnnnnnnnnnnnnnnnnnnnnnnnnnnnnnnnnnnnnnnnnnnnnnnnnnnnnnnnnnnnnnnnnnnnnnnnnnnnnnnnnnnnnnnnnnnnnnnnnnnnnnnnnnnnnnnnnnnnnnnnnnnnnnnnnnnnnnnnnnnnnnnnnnnnnnnnnnnnnnnnnnnnnnnnnnnnnnnnnnnnnnnnnnnnnnnnnnnnnnnnnnnnnnnnnnnnnnnnnnnnnnnnnnnnnnnnnnnnnnnnnnnnnnnnnnnnnnnnnnnnnnnnnnnnnnnnnnnnnnnnnnnnnnnnnnnnnnnnnnnnnnnnnnnnnnnnnnnnnnnnnnnnnnnnnnnnnnnnnnnnnnnnnnnnnnnnnnnnnnnnnnnnnnnnnnnnnnnnnnnnnnnnnnnnnnnnnnnnnnnnnnnnnnnnnnnnnnnnnnnnnnnnnnnnnnnnnnnnnnnnnnnnnnnnnnnnnnnnnnnnnnnnnnnnnnnnnnnnnnnnnnnnnnnnnnnnnnnnnnnnnnnnnnnnnnnnnnnnnnnnnnnnnnnnnnnnnnnnnnnnnnnnnnnnnnnnnnnnnnnnnnnnnnnnnnnnnnnnnnnnnnnnnnnnnnnnnnnnnnnnnnnnnnnnnnnnnnnnnnnnnnnnnnnnnnnnnnnnnnnnnnnnnnnnnnnnnnnnnnnnnnnnnnnnnnnnnnnnnnnnnnnnnnnnnnnnnnnnnnnnnnnnnnnnnnnnnnnnnnnnnnnnnnnnnnnnnnnnnnnnnnnnnnnnnnnnnnnnnnnnnnnnnnnnnnnnnnnnnnnnnnnnnnnnnnnnnnnnnnnnnnnnnnnnnnnnnnnnnnnnnnnnnnnnnnnnnnnnnnnnnnnnnnnnnnnnnnnnnnnnnnnnnnnnnnnnnnnnnnnnnnnnnnnnnnnnnnnnnnnnnnnnnnnnnnnnnnnnnnnnnnnnnnnnnnnnnnnnnnnnnnnnnnnnnnnnnnnnnnnnnnnnnnnnnnnnnnnnnnnnnnnnnnnnnnnnnnnnnnnnnnnnnnnnnnnnnnnnnnnnnnnnnnnnnnnnnnnnnnnnnnnnnnnnnnnnnnnnatggtggtggtggtggtggtaatagtggcggtcatcgtggtgataactagcattgatgaaatactctgtgtggtggcacttttactgagttctttgcctacattatttgcttttgttcttctatgaacacaggaagtagatacttgaagaagtgatataacttgcctctgttagctaatgtcagggctgatatttaaatccaattctgactttaaaaaccatttctctcaactgctacattgtcttgcccctccaagttgctaaaacagtaaaagtgcatattcatactttccatattcataacttaaggggctttctattctatccaagttattaattgacaaattataatgtcttaataatagaaaacatttggataacttaagaactttttcagatacatggagtatgtctgtgtggtacgcttttatgaatctatattatataaacttacacaatctgttttaactctatcttcttcccattttgtaaaacaaatgtcctcattatatcaatggtttaagacatatgagtgtcaagcaaagcttgttaaaaggacactcatatacaaagtatgcttttgaattgcaaaaggagtctcatgcccaatgttgtgaagacacttcacaggtctgtttatgttcaaacatgggtttgggttcattaagattaaaattcagctaagtgtctgcattgcctttgccgtcaatttcagctaaactcaacttgcttggctatttatggaagaaaacaggtcccttctttccctggttcatttatgtctcactacatggcattgtgttctcgctaactcactacatatataaataaaattatttatgtaagatttattgatgctatatgcacatgaagattgtacgccataattcttgtatacacaactggatcgtgctctcttatttaaaggaataatctctttgttcaatcttttctccttaagcagctaggacacttcagtttggtgatattatgaatgagagtgttggtgatattataaatgaagagtattgttgacatgcatgcatgcgtataatgaagcataaaggcattgatttctataggggattagagggataatagatgggattattcatatctccagtttcactagataagacagggctcaatcaagcgtttgagaagtgtgtgagagttcttgttggtctgaatcctaataaagtttggtctttctccatccatttgtttcaaatatggaagctcattaatgtgatcactgtactctggctaccaatgaaagttaagaacctattactacattatattcacattttacatgaaacatatgaatttatacatttctaattataaatgtaatataaatcctcctttgtaatacttctttaaaagttttctaaatggcatttagattactctttatgaaaccaagggtcacataagttagagtgctcaccacaactcagcaatggggtcagcaattttacatattaactattggccatgcacttataaatggatggaatatgtctaagggaatttcatagcttatcacaatttatgacttgtaattccctggaacattcaagacctccaagaaactatacgggaggcaaaccttagcttagactcagtatcactgttgtttcagctactgtttttacactatggcactgccctcaagggttaagtttcctctcaactgcacctgtgcacaagacagaagagagtattcttcatgccctccctttgtctttaaagagtccaaagaaccttgcagattttgcaccactaaacttcagaaaatcccttggagatcaagaggcatgtgcactgatgttctcatcacaagaggagacagatctccctgtgaggacgtgaccacatctgtacagacaaggcacagatcttggaacagaacgtaggttctgttctagctcctatgctaatgtcaaatcaaatgccctcgatagggtgtcggcgtttatgaaacatgagcactatcctccacacgattcctaataaacaccagctagaacacctagtttctttttattaagaagaagatacacaacaaaattacataggcgttcacgcaccgttctagtgagtcttattaaagctaaaannnnnnnnnnnnnnnnnnnntccaattctgactttaaaaaccatttctctcaactgctacattgtcttgcccctccaagttgctaaaacagtaaaagtgcatattcatactttccatattcataacttaaggggctttctattctatccaagttattaattgacaaattataatgtcttaataatagaaaacatttggataacttaagaactttttcagatacatggagtatgtctatgtggtacgcttttatgaatctatattatataaacttacacaatctgttttaactcttatcttcttcccattttgtaaaacaaatgtcctcgttatatcaatggtttaagacatatgagtgtcaaccagagcttgtaaaaaggacactcatatacaaagtatgcttttgaattgcaaaaggagtctcatgcccaatgttgtgaagacatgtcacaggtctgtttatgttcaaacatgggtttgggttcattaagattaaaattcagctaagtgtctgcattgcctttgccgtcaatttcagctaaactcaacttgcttggctatttatggaagaaaacaggtcccttctttcccttgttcatttatgtctcactacatggcattgtgttctcgctaactcactacatatataaataaaattatttaagtaagatttattgatgctatatgcatatgaagattgtacgccataattcttgtatacacaactggatcgtgctctcttatttaaaggaataatctctttgttcaatcttttctccttaagcagctaggacacttcagtttggtgatattatgaatgagagtgttggtgatattataaatgaagagtattgttgacatgcatgcatgcgtataatgaagcataaaggcattgatttctataggggattagagggataatagatgggattattcatatctccagtttcactagataagacagggctcaatcaagcgtttgagaagtgtgtgagagttcttgttggtctgaatcctaataaagtttggtctttctccatccatttgtttcaaatatgggaagctcattaatgtgatcactgtactctggctaccaatggaaaggtaagaacctattactacattatattcacannnnnnnnnnnnnnnnnnnnttataaatgaagagtattgttgacatgcatgcatgcgtataatgaagcataaaggcattgatttctataggggattagaggaataatagctgggattattcatatctccagtttcactagataagacagggctcaaccaagtgtttgagaagtgtgtgagagttcttgttggtctgaatcctaataaagtttggtctttctccatccatttgtttcaaatatggaagctcattaatgtgatcactgtactctggctaccaatgaaagttaagaacctattactacattatattcacattttacatgaaacatatgaatttatacatttctaattataaatgtaatgtaaatcttcctttgtaatacttctttaaaagttttctaaatggcatttagattactctttatgaaaccaagggtcacataagttagagtgctcaccacaactcagcaatggggtcaccaattttacatattaactattggccatgcacttataaatggatggaatatgtctaagggaatttcatagcttatcacaattgtaattccctggaacattcaagacctccaagaaactatacgggaggcaaaccttagcttagactcagtatcactgttgtttcagctactgtttttacactatggcactgccctcaagggttaagtttcctctcaactgcacctgtgcacaagacagaagagagtatttttcatgccctccctttgtctttaaagagtccaaagaaccttgcagattttgcaccactaaacttcagaaaatcccttggagatcaagaggcacgtgcactgatgttctcatcacaagaggagacagatctccctgtgaggatgtgaccacatctgtacagacaaggcacagatcttggaacagaacgtaggttctgttctagctcctatgctaatgtcaaatcaaatgccctcgatagggtgtcgacgtttatgaaacatgagcactatcctccacacgattcctaataaacaccagctagaacacctagtttctttttattaagaaaaagatacacaacaaaattacataggcgttcacacaccgttctagtgagtcttattaaagctaaaattattctttcccaannnnnnnnnnnnnnnnnnnncaatggttcacgccgaatttcagtttagtttctgcttctggaaacttcttagagcttattataactatttcatactgatctattagtatccatcttcgctttcgcactgtggactggaaagtaaaggagaaagaagtcgattgttaacaataattggaacgtcttttgtaaccaaagggagggacatgttttcttcattttcctttgcccggtcgtcagggtgctatgaggagcactcagagcagtctggaaattatatcaggagagagctgtcactattgccaatcaggtagccagaaataatgagagggtcagaggaaatgtctaaggtaaattttcttggcactcacagctatttctcttatttctcagagatccatagctcactgttgcctaagttggtctgctaggtattggatagtgagatggtaccactgaggaagagaatcaattgctgtgataggccgtcatttgttaaagaaaactagaataccataacagactttaaaaaaaaaagtgactacttttttatttcgttgcttttgagtaaaaaaaaaatatatatatatatatatatatatatatatcatctagggatactccattatgatttaataagcacaaaaacaaggtttttttccctctcttttcttataccagaaaaagttcatgagttagttattttttatgacctgtaagattcagtggcagcacacaaaacagaagcaaactaaacaaacaaacaaacaaacgagaattcgccttcattcccagtgtgtgctgtctacaagccatatttttagataagtacattttccccccttgagacacccaaaccctggccatctccattattaaagctcttggttcctggactctgttctttttttttttttttttttttttaaatatttttattattacgtattttcctcaattacatttagaatggactctgctcttaataaaataaaacaccaggtctcaacagccacaaacgctcagggccgtgcctagggtatcccagactcttgctgtatctcttctgttaggatcaagttagagataaagtttctcttttaagatttcctcttcaggaatgttgttgctatgtgcattttctctgattgtttttcctctgattgttcttgtgaattttctcgattctcttccttctgggattgtgattaccttatgttgtattatctggatcaaaatcctttctttcctaaacagtttttatttttaaaaattctgtctgctagaagaaatgttccgatatatctaccatcttttctattcatttttttgttttgttcatgattttattttaaattttagcatgtccttgttcattcctttttatttagtcttatacaaggactattttatctctcaaagaggacacatagatgtccctttgaggttttcctctgtttctccgtttcctgttgatttggttggaactgttgcccacactagtctctcaaatttattctgggaagttctgctgaaagaccctcggttcttattttaaagcggggcatgatataacgctgagggccttggtcttgtgcaggtcgccgctgctgtgatgggtatgtctgttcggaacacagcatttcaaagtgctgcgacaacccctaactcagccttaaagtaggtaacacagatgtccccttgagggctgagcacgtaacagccacttcttctcagcacttttaccaattaggctatctctgcaataagattcttccactttgaatagatgcttctctgatcaaggctgaaggcagcaccaatctctgggtataaacagaaacagttagaggctggtttgatctcatgtccatttatcaaaacgggtcggttctctctagagccaggttgacagtaatgggtatgagtctcttctgtgagatggacttaaaaatctacccacaaggccgctcgctggttggtcctggaatagccataccactactctacagggagctgaatcttatccagcaggtgtttaccatacttttcagggttcatagttacaaatacagttgctgatttttgtcctctagctgcctgcagaacctactttggtgctgtgaagtctagccagcaaggagggaggttgaaagtcagttccaccttgatttctctctgtgctacaactgaattgaatggtgtcctccatgatattgatatgatctagtgctggaggtcaagcaagaggaatatacaagcttgtattgcttggagatgctctgggaccttcttgattatgatacatgagcaggtaataggtctcataaggtcgctcttttccagaggagctatggtagttaaagaagggtcctatttacacaagtgtgtgcacactctgatatacattgctcctgcccatgctcattcagaaaactctcattaaacacacacacacacacacacacacacacacacaccattaagaggggagcttgagaagaggaacagcttttctagaagcaggaaaagaataaaagaatatagtgatcaaagaaaattttatatatattaaattctagaatgaggcacacaagtgaggcaataatgacacagaagatgataaatatgccagcaaaagttcacaggtagggactcttactatggattcactataacatggttagctcttcagctgccttgttctttgagaagtttcttgatgtttctgtaagtaggtttcttaatggctgtctgagggaccttcctgtggcacacacatatgattgctagtgttcgtggaccagtgtgtgtaagaaagttgagtttcttactagccatatatagtctttcaatgaaatgtgtttttcaacctggagtttccttcaagaaagaaatatttagcctctaccaagaaacagaaatagttaggatctaatggctccatctattcttgtaatgctttcaaatcttcactaaattcctgccttcctgggtagatgtggcttccagcaccaaatcttcctgggttgtgtagctcctcgcttcacgttttcttgtgatttcttccttttagttagagaagcaggtgacatctctcttttacagatctcttctccctttattatctatgtctggttggatatgcacatttaacattcggccgagttagatgtgaaaaaaaataatagtaagagagaagttgatacatgcatctgacaagatttttcttcgttgttcatggccccttgctagaaatacagcagagccaaagctgaagacaaatgtgacaaatgtacgttagggttaggtaggtcatgctttcctactgatcagcaagatgatgatgatggtggtgacgatgatatgatgatgatggtggtggtggtggtggtgatagtggcggtcatcgtggtgataactagcattgatgaaatactctgtgtggtggcacttttactgagttctttgcctacattatttgcttttgttcttctatgaacacaggaagtagatacttgaagaagtgatataacttgcctctgttagctaatgtcagggctgatatttaaatccaattctgactttaaaaaccatttctctcaactgctacattgtcttgcccctccaagttgctaaaacagtaaaagtgcatattcatactttccatattcataacttaaggggctttctattctatccaagttattaattgacaaattataatgtcttaataatagaaaacatttggataacttaagaactttttcagatacatggagtatgtctgtgtggtacgcttttatgaatctatattatataaacttacacaatctgttttaactctatcttcttcccattttgtaaaacaaatgtcctcattatatcaatggtttaagacatatgagtgtcaagcaaagcttgttaaaaggacactcatatacaaagtatgcttttgaattgcaaaannnnnnnnnnnnnnnnnnnnaaacatgagcactatcctccacacgattcctaataaacaccagctagaacaccttaggtttctttttattaagaaaaagatacacaaccaaaaattacataggcgttcacacaccgttctagtgagtcttattaaagctaaaattattctttcccaaaacttttgactctgctaatcccctgagtaattgttagtgttcttgagctgacaagaactaatttatattagtgcctcaattcctagtcctgatgcccgcttccttcccactggccttcctaatctcccccccaggtttagccgtgagatgtgagggctaccttggttagctgctgtctgaacattcagcgccagtgtctcatctcatgcagaactcttgcttcagacgctagaaagcaattttaacaaccttcacatttttaatggatttttaaaaaaatagtgcttgaacttattctttgcatgaagctcagaaaataagactcagaaataaataggataccttaaaattcattccactttcatgtgaggaactgttgggagccgcgcccacattcgccgttacaagatggcgctgacagctgtgttctaagtggtaaacaaataatctgcgcatgtgccgagggtggttcttcactccatgtgctctgccttccccgtgacgtcaactcggccgatgggctgcagccaatcaaggagtgacacgtccgaggcgaaggagaattctccttaaaaagggacggggtttcgtttttttctctctctcttgcttcttgctctcttgcttcttgctctcttgcttcctgcaccctggctcctgaagatgtaagaaataaagctttgccgcagaagattctggtctgtggtgttcttcctggccggtcgtgagaacgcgtctaataacaattggtgccgaattccgggacgagaaaaaactcgggactggcgcaaggaagatccctcattccagaaccagaactgcgggtcgcggtaataaaggtttcccgtaaagcagactgttaagaaggattcaactgtatgaattcagaacttttcagctggggaacgagagtaccagtgagtacagctttacgaggtaagtctgatccttgaactttctaaggaaattcaagacagtctatcagaagtaaagtggaaaatggctttgcaaggtatatttggccttgaattttttctagtgttagannnnnnnnnnnnnnnnnnnntgctaatgtcaaatcaaatgccctcgatagggtgtcggcgtttatgaaacatgagcactatcctccacacgattcctaataaacaccagctagaacacctagtttctttttattaagaagaagatacacaacaaaattacataggcgttcacgcaccgttctagtgagtcttattaaagctaaaattattctttcccaaaacttttgactctgctaatcccctgagtaattgttagtgttcttgagctgatcaaggcactaatttatattagtgcctcaattcctagtcctgatgcccgcttccttcccacttgccttcctaatcttccccccaggtttagccgtgagatgtgagggctaccttggttagctgctgtctgaacattcagtgccagtgtctcatctcatgcagatctcttgcttcagactctagaaagcaattttaacaaccttcacatttttaatggattttttaaaaaatagttcttgaacttattctttacatgaagctcagaaaataagactcagaaataaataggataccttaaaattcattccactttcatgtgaggaatttacaatcaaaagcctgaatctgcagcaattagttcagtgttccttctaagggtagagtcatatgactgtaggcagttcaacctggctacgtttgaatccaagctttgtactaactagctgcattacaattggctggttatcaaggctctctgtgcctcaatacccccagaaaatgaaatgtggataatagaaatctgaagaatcaacaggatagaacatatatatggtgtgttcatacatatatgtacatgtgtacatgtgaatgcttaaaatcatgcttgtctgccataaaggctgaggggatgcctgctctattaccttatctcatgaattagtattgagaacaataacagaaatagcaaaatgaataagtagtcccttaaaattcctgaatattataatatcagggtaatgttgactgaaatactgtacaagttagttcttttatctccatgaagtcaatgtcacagctagatgatgtagagctacactaccattcagcttcttttctgaactgacaatcatagcttccattccactttagcaatacaaaactgtcatctgccataaagtaaagtactatactcagattttctctgcaggaggattccctgatatgtcaaagcaaagcgaaggcttcctagaacgacgaatggaacttctacagtggttctggagcttccaggctcaggaaagatactgaagatgagacacgatgtgaatagagatagaaagagtggatgacaccatagtaaagttgtcttgagggaaaagggtaatatcttattcacctttgtatttccagaaactaatggctaggtgattagtagtgaatgaatagaggaatgagctaatggatgatagcagaaaaagaaagttaaatacagttgggggccattcattcatcacgtatgcatcatgtgactaggaattatactgggcttagaccctgaaatatggacttgaggcagtgttgatgctttagtacctgagaattcaaggatatcaagtagaaagaggaatgttaaattccatcacagtgtgccatggatgcacacttatcaaggctaacaaggaagagaagttggagattcttgaagaatgtagactcttccgttctccctgagaggagaagtctttgatctggggctttaaggatgcagagaaataagtgagctctggagaaacgatacacatgattgtccaagacaaacactgtgctgtgagaagcttgagaatctcacacacaggtcacatccaatgggctccagacagtggggaaggagggagcaagatgatggttaaagagaagccatccagcatgacctgctgatggatcctgaattgctaaggagcttgtgggtttgtttgtttgtttgtttgttttagcactgagtgccactatgtgatttcattcaaggacagagccaccatgtttgcaaggcttggttcctctctttctgttacagctttagaaatatgaccatttactccttttaccaggaaacttcctggataatggctgttctaatctgcaattttggaaaaaatggtgacttgaagtactctttgtgagtctttttaactttgtttatgtaatttttgtccaatatatctaaaaccaaaacaaatatctcatgggtcaggtgccataatttagctttaggctttgctcttgcatcactgtttgaatccaccacacttagtcacttgaggaaaagttcttttttggcttttaggtataatgtttcttgtagtgagtttacatgctctgaaactgttttttagaagtctataacccttcatttttgtgaaatgctggtttgggggcagaacgggagtgttcatgggcataagggaagcaagaaaagcagttgagagcctactattataatcatgtaaaaaacagaggtcttcaatggagagtcctcacaagagaattcaacagttgtttgtaagtagaaggggcagaagttggtgactttcaggagactgtgagagactcaaggatttctggcttcacagactatgtggttgatggtagcatctattcttagcatgagaccaggaaatacaggttaagtaaatatctgtattaagaagatagtgttcgaggtgtctgtgcacatccaggagaaatttataaaatgtggaaagagtaatcaaagttggagttttccataggaaacttggtaagttcagaagtccgcaggatgactatactcacagagagaaatgaaaaagagagggagggagggagagaaagagggaaggagagaaagaaagagggagggagagagggagggagagagagaactccaacttagattactctaagaaaataatccaacagattgacacaaagtagtcaagaaatagatgaaaaactaagaggagaatggggttctcccatcgaaggtgcaaaagaatgctaaggatttgaactgctgaaaaaatatttgagatgaaaatattacatgtgctaggtgtggatagatatgtagggaagagaggaacatatgtaatatagatcatgggagggggcatatgttaatgaaaatcttacaaagacacgcacatgtaaggtttatcatagaggattgagtnnnnnnnnnnnnnnnnnnnntacatgtgattggatactgaattagctaagtaaaactcttgaaatatagagaaagaagtctagaattgaaaatataatagactggataaaatcgtatgaaaaccatggaagaagcagaatatgcaaaagcagggaaaaaaatgaaaagcctttattgacacaaagagtaattcaagttagtctgcaggttaaagtgcccaccacgggaaaaggtacagacattggcatgtactggtggaattttggaattccagaaataagaaagtaattctaaaggttcttccaactgaaaagaaaaggaaagaaaagaagagaagaggagaagagaagagaagagaagagaagagaagagaagagaagagaagagaagagaagagaagagagaggaaggaaggaaggaaggaaggaaggaaggaaggaaggaaggaaggaaggaaggaaggaagaaagaaaggaaagctctcagagatatcagacttttcgtcagcaagattccaatctgggaaagaagcggtgatgttgttgatagccaaactggcaagattgagagaaactaatgatgtatataagcatgcaaagaacgcgtttacaaaggtacttgctacatagtcttcctgatttaaaagataatgagtcgaagatgtcctccagcaaacacggtgtgtgacaaagcaacaagaatccagtagaataactaacctggtgtacgaggagtgcagggtgcaacctagaccatttaggaaaaccaatctcaatattacagcagcccagcaggcttagaaagtgggctgcctgcattagggagagttgtcagcaagtttgtaaaaaaatgacttcaagaagaaagaagacaccacaagtcaacctgtagttttaagaggctttaataactaacttcattgagcttctagactgacctaggactagttttaatatcactataattcttgtccatcctaaaagtagatacatattttaaagtttaaaaaaatctgaattaatgtctcctaatgtcgtttagatgattaaatgttttatgggagttaagggattgttttctatttttctaactgctacatagaagacctgctatggaaatatattttacaatgttctaccttccttataaaccatatttttacatttctcatacttcttaattaattttgaggtagtagaaatgcaataattttgaccagcactttccaactccatccctgtgcatttgatctttcttgcttgattgtttaggttatagttttccaagcaacattaaaccatatttaagacaatggacaaacttttctcatttctgattagcttcatcattaactgtgaatgttggatcaaagcttttgctttcgtgatagaaattgctcttctagtattattgaataaataacccaattctattttactgtaacttcagcaataaatacaataggctatactatagacattaaataatgagataaaaatggtgggctcaaacaatgctctgaaagactaagccactaatagaataaatataatactgtgggcagataaaaggaatccagccatccaatgctgactatgaataaagatttacaatggctgacttcatatgttcctggactttctatcgctgtaacaaacactcaagataatctacctataaaaagaaaaggttgatttagcatgacagttttggacagtttctatcatggtctgttggtccttctgttttggggactatggcaagaggatgcatactcggagggcatgcatggctaaggagaactgctcacctgataaccagggtgcaaaacagagatgggaagagattggggcaaagctacaaccattcaaggcacattcccaataacaagaagacctcttgttgggccacaccctttaaagattcccccacttttcagttgcaagtggctgaggataaagctacttcatcatgtggctatttatgggacatttcacatccaaattatagtatttgacatggctgcaaggcatgaaactcatttagacatagtaggactttatggcttttcctgattgtgttattaacaaaacatgccaaaaacatgatactagtttaaagattaacgttgaatttaacttcatttatcattatttgattaaaggtctttagcacataatcttgagatgtcaggtgaagactcttgttcatctatctgccttgcgagggttgacagggagtcctgagatgtttcctttttacgatgctccccagtttgttgcatttaatgtgactatacatccatgcaccaccttctttatatttgtcattcagatcttgagttatactatggttcaagataagtgttaacaggattaagagaaacactaggcaagcctgccatctgtcccttagggatatgacacccattcctgtcaagatcctactgagtcaagcttttttttttttttttttaactaaacttcaaagaggatcaaaaccaggcatcatgtggttcatccctctcacataataagttctgtttggactcccgagttgcctgtggcctttttccaaggagcaaatttttcagctaagtacttgctgttacaagagtttttacaatttgagtggtgaacctcaagaaaccatatgagggatatatatatatatatatatatatatatgtgtgtgtgtgtgtgtgtgtgtgtgtgtgtgtgtgtgtgtgtgtgttttaaagtggagagactctgtgttaccacctggtgaacagtatggtgggtggagacaagtgccgtacagacaacggagaaagtcgttttgcaggcagttctgagaagtgatttaccagttccaagcagggcattgcaggagtggcaagcttgccttgattctctgtggttgatagtcagacccagtgtttacgctagaagggactatagtgattgatgcagagacaaggaagctggggcccacagtgatccaggcttacgtctatcacacttacttgagttacataatgtaacccacattccgaaatatacaactactgtcttactttgagatttacaatgacagattctgaggtcatgcaagaaacagaccagagggaagcattagaattaggtcagtggcttgagtcctggctcctaagcaatcacaatttctctgaccacagtccgaggctgagaagatggaaaatgtgtatgtgtgtggtcataacatccttgttctaccatgtcctcgatagagcttaaggtatacaggtaggaagatagcttactgcaacccttagttctttatgattgcctcctatgggaatattttaaaaaaacagttcaacaattacaaatttatttatttatttatttattgggggggggcaggcatgccggtgataccaaacgagtgtggaggtcaaagaatagcttgtgggttttcctccttccatcatgtgggtcctgggaaccagattacgtcatcaggtctgaaaagcaagggccttaaccatctgaaccatcttgccagccatgatatttcaaatttttggagtaagcagttaatgagaaaagacacagttacattttacattttaaattagattttgctttctgggaagataggaatgcaatgataagcgtgggattgtgcaataaaagtggttcctcttattatatctcattttctaggtttttaaatatttctacaatgagctcttaatgcgtagttttaatatataaatgaccgataacatacttatgccacaaaaagttttgaaaattaaggctataggaaagtttgtctttgtcttattttagcctgcctggcttctccccctcccctcccttcaaatatattattgcatgcatgtatttgggcagtatacacttatgtgcaagtgtgtactgctctggaagaaggtgaagacagtcttttattgaacctggagctagcctggcaggcagcaagattcagagatcccccatgtctctaccccctgtggcactcgggctacatgtgcatggagagcctcatagagctttttgaatggtactgagaatcctaactcagagtctcatgcttgcacatagaatccttacatccactgagccatctctctagtcttagtcctaaagcaatctttttaaactatgagttaatatgcttgtcaaattgtgtgcatgtgtgtatgtgtatttgtgtatgtgtatgtgtgtgtgtgtgtgtgtgtgtgtgtgtgtgtgtgtgtgtgtgtgtgtgtgtgtgtgtgtnnnnnnnnnnnnnnnnnnnnnnnnnnnnnnnnnnnnnnnnnnnnnnnnnnnnnnnnnnnnnnnnnnnnnnnnnnnnnnnnnnnnnnnnnnnnnnnnnnnnnnnnnnnnnnnnnnnnnnnnnnnnnnnnnnnnnnnnnnnnnnnnnnnnnnnnnnnnnnnnnnnnnnnnnnnnnnnnnnnnnnnnnnnnnnnnnnnnnnnnnnnnnnnnnnnnnnnnnnnnnnnnnnnnnnnnnnnnnnnnnnnnnnnnnnnnnnnnnnnnnnnnnnnnnntcctcctccccctcctttttttgagtagggttgaagttcctcatacatgtgctgaaacaccttactgactcaatgctccccctgtccctgtttgccaaatttcttctttagctgatgtacaatttttatattacaaacagtatttcactggatactgttatgtatgcttatctatgccttgaattgattttgccatatggtcacggtgggcctggtgttcactgttgtccattctggcctcaaacttgaggttactcttagccatccaaatgtctggattataggtatcccctaccatttcttgttagtaccttactgatttttaaattggttaattagtaatataaatgagggggggacaataagctgaataaccataaaagaagatactaaagggaattgaatcattgcttctggagtatagaatagttgccaaatttaaaaaaaaaaaaatcttacatctccactgcaaagcataggatttcagaaagtcagagatcttaaagtcttagcagaagtccccattatacatatgtactttgtatttgttgcccttgtgcaaagggagcaggccctttaatctagagctggaagtttgctgtctggaaggcactctgatgggtagggcaaggtaaaggcgcatggctgaccttaggatgagtcgcctgccctattcctacagtagtttccaaacacaggcgacgggtaggcatgcagtgatgctctcaaaagtgtctgataataacactgagagtgcctgccaagccttgaaactcagctgtcagccttgtgggtatatagtgtatctgcctcagctgccagcaaaccttttacaactcaggtaaaactgaagaaaaacaagaaaatgggaatattccttaaatttttcaaaattcacgttttctaataactaagatattattattattattattattattattattattattatgttaaatattctatgcagactttataatgaaagcttcatggtcatactttgtaatattccaaagtgctccatgaaagctattataacgttacaaacaaccaaaagccagaaaggttaaggaccttgaccaattaattattagacagcttttggtcatagtgatggggttccttacgcgttaaaaaaatttgagctcttaacaacatactagagagaaagaaattcgcatagttggtaattaagcatttccgtatgaaatgaatcagagacagatcactgctttgaattataatgctttactaacataacctaaatggtaagctaaagatacgacctgaccgtctatactgctgcatgtgcactggaggcaacagtagtgaacattctcatttttactatcttaactttagagtggggagtgttgggatgacagaggcagagtgaattagtggggtgtgttgtctgaaacctgagttatctgacatttttgaggcaaggaattgattattatgaacataaaaatggcaagagagaagtaataccatccgctagataacaagtctttgttcttcaacagggacatttgtttcgacttgagaggaataagatgtctatcaaactttcccagtgcctgaactcttttataatggccacgctcacgaaggtgacatttatgaccacctggtgtcccttggtttccttacactcactgttgttagggtgaatgtattcttgcctgctcccctgattgtcaccggctcctgaaaatagcccagctggcattctctgtgatcacatggcaatattgtcagccgtaataatgcaccaagaacacagattcgggacctgttctattaggtcccttaagtacatattctctagatttgtttgtttgtttgtttatattaggtatttatttcatttacatttccaatgctatcccaaaagtcccccaccaactcccccacccacccactcccacttcttgaccctggcattcccctgtactgaggcagataaagtttgcacgaccaatgggcctctctttccattgatggccaactaggccatcttctgatacatatgcagctagagacacaagctctggaggggtactgggaagttcatattgttgttccacctatagggttgcagaaacctttagctccttgggtactttctgtagctcctccattgggggcactatgattcatccaatagttgactgtgagcatccacttctgtgtttgctaggccccggcatagtctcacaagagacagctatatctgggtcctttcagcaaaatcttcctagtgtatgcaatggtgtcagcattcggaggctgattatgggatggatccccagatatggcagtctctagatggtttcctttcatctcagctccaaactatgtctctataactccttccatgggtgttttgttcccaattctaagaaggggcaaagtgtccacactttggtctttgttcttcttgagtttcatgtgtttagcaaattgtatcttatatcttgggtattctaagtttctgggctaatatccacttatcagtgagtatatattgtgtaagttcttttctgattgggttacctcactcaggatgataccctccaggaccatccatttgcctagaaatttcataaattcattgtttttaatagctgagtagtactccattgtgtaaatgtaccacattttctgtatccatttctctgttgaggggcatctgggttctttccagcttctggctattataaataaggctgctatgaacatagtggagcatgtgtcctacttactggtttgaacatcttctggatatatgcccaggagaggtattgtgggatcctccggtagtaccatgtccaattttctgaggaaccgccagactgattttcagagtggttgtacaagcttgcaatcccaccaacaatggaggagtgttcctctttctccacatcctcgccagcatctgctgtcacctgaatttttgatcttagccattctgattggtgtgaggtggaatctcagggttgttttgatttgcatttccctgatgattaaggatgttgaacattttttcaggtgtttctcagccattcagtattcctcaggtgagaattctttgtttagctctgagccccatttttaatggggttatttgattttctggagtccaccttcttgagttctttatatatattgagtattagtcccctatctgatttaggataggtaaagatcctttcccaatctgttggtggcctttttctcttattgacagtgtcttttgcattgcagaagctttgcaattttatgaggtcccatttgtcaattctcgatcttacagcacaagccattgctgttctattcaggaatttttcccctgtgccaatatcttcgaggcttctccccactttcttctctataagattcagtgtctctggttttatgtggagttccttgatccacttagatttgaccttagtacaaggagataggaatggatcaattcacattcttctacatgataactaccagttgtgccagcaccatttgttgaaaatgctgtcgtttttccactggatggtttttactcccttgtcaaagatcaagtgaccataggtgtgtgggttcatctctgggtcttctattctattccattggtctacttgtctgtcgctataccggtacacaattgctctgtagtatagctttaggtcaggcatggtgattccaccagaggttcttttatccttgagaagagtttttgctatcctaggttttttgttattccagatgaatttgcagattgctctttctaattcattgaagaattgagttggaattttgatggggattgcattgaatctatagattgcttttgtcaagatagccatttttactacattgatcctgccaatccacgagcatgggagatctttccatcatctgagatcttctttaatttccttcttcagagacttgaagttcttatcatacagatctttcacttccttagttagagtcacgccaaggtattttatattatttgtgactattgagaaggatgttgtttccctaatttctttctcagcctgtttatcctttgtgtacagaaaggccattgacttgtttgggttaattttatatccagctacttcattgaagctgttatcaggtttaggagttctctggtggaatttttagggtcacttatatatactatcatatcatctgcaaaaagtcatattttgacttcttcctttccaatttgatctccttttgttgtcgaattgctctggctaggactttaagtacaatgttgaataggtagggagaaagtgggcagctttgtctagtccctgattttagtgggattgcttccagcttctcaccatttactttaatgttggctactggtttgctgtagattgcttttatcatgtttaggtatgggccttgaattcctgatctttccaagacttttatcatgaatgggtgttggatcttgtcaaatgctttctccgcatctaacgagatgatcatgtggtttttttctttgagtttgtttatatattggattacgttgatggatttccgtatattgaaccatccctgcatccctgggatgaaacctacttggtcaggatggatgattgttttgatgtgttcttggattcggttagcaagaactttattgaggatttttgcattgatattcataagggaaattggtctgaagttctctatctttgttgggtctttttgtggtttaggtatcagagtaattgtggcttcatagaatgagttgggtagagtaccttctgcttgtggaatagtttgtgcagaactgggattagatcttctttgaagatctgatagaactctgcactaaacccatctggtcctgggctttttttggttgggagactattaatgactgtttctatttctttaggggatatgggactgtttagatcattaacctgatcttgatttaactttggtacctggtatctgtctagaaacttgtccatttcatccaggttctccagttttgttgagtatagccttttgtagaaggatctgatggtgttttggatttcttcaggatctgttgttatgtctcccttttcatttctgattttgttaattaggatgctgtccctgtgccctctagtgagtctggctaagggtttatctttcttgttgatttctcaaagaaccggctccttgtttggttgattctttgaatagttcttcttgtttccacttagttgatttcgcccctgagtttgattatttcctgccgtctactcctcttgggtgaatttgcttccttttgttctagagcttttaggtgtgttgtcaagctgctagtgtgtgctctctctagtttctttttggaggcactctgagctatgtgttttcctcttagaaatgctttcattgtgtcccacgagtttgggtatgttgtggcttcattttcattaaactctaaagagtccttaatttctttctttatttcttccttgaccaaggtatcattgagaaagtgttgttcagtttccatgtgaatgttggctttctattatttattttgttattgaagatcagccttagtccatggtggtctgataggatgcgtgacaatttcaatatttttgtatctgttgaggcctgttttttgaccaattatatggtcaattttggagaaggtaccatgaggtgctgagaagaaggtatatccttttgttttaggataaaatgttctgtagatatctgttaagtccatttgtttcataagttctgttagtttcactgtgtccctgtttagtttctgtttccatgatctgtccattggtgaaagtggtgtgttgaagtctcccattatgattgtgtgaggtgtaatgtgtgctttgagctttactaaagtttctgtaatgaatgtggctgcccttgcatttggagcatagatattcagaattgagagttcctcttggaagattttacctttgatgagtatgaagtgcccctcctcgtcttttttgatgactttgggttggaagtcgattttattagatattagaatggctactccagcttgtttcttcagaccatttgcttggaaaattgttttccagcctttcatttctctagatttaaaccctggtgttttgctaataggagtaagttttcctcttatttgcaaagaggttccccttatggctgaagaattgtgttatttttcatccttataaatatcagtgtaaaatgtatacagtacaaaatgtaaatagcatgaaaacggccatttaagaccatactgattgttgaatcgagccaggagattttgcttgataaacaataaggaaactaatttttttttaaatctctttagtcttcctttttgtttattccgagaatcctcagaagattactcaataactccaaattaaagcaccattcctgataagttttctagaaggatctgcagtgactgttagactcccactaaccaggaagtaaaatcaacaagtaatgacttcacaagaaaatgtcagtgatgggtggtgagatggctcagtggataaaggtgcttgccaccaaacctgaaagactgagttcagtccttggtacccacatggtcaaaggagacaagagtgccacatgatgccctttgatctccatatggactgtgccttagtgtatgaacatgcatatgcacacatgcacatacacatacacatacacatacatacatgcacactcacacacatatacaaacatacacatactccctcacacatttacacacagaagcacacacactcacacaaacacatacacacacaaacacagtcacacataaatacattcacactcacacacataacacatacacactcacccaaatgctcatatactcacacacacatacacactcacaggtaaacacatacaattacacacacacactcacacacaaacacacatacccatacactcactcacacaaccatacatacataaacactaaaaatataaaagcatttttaaaacacaatactgtgatataaagttacacaaacaggcatttagaatggaaaaacaaggaaatgaatgagtttttagagctacatggggaatagtccttaggaaagacagagcatacatctacctcatgttaacattggaacaaggatgacgggagagccctgatgctgagccctgtgagaagtgataagacttatggttctgtgttgtaggaagtcctcctctttaggtacttattaaaaatatggagatattggaagaaattcttaggtttttctttaaactaaaatatagtatattaagaaatacctatttactcctataaaaaaaaaaatccaacttttcatgaattgagtaaagaaaacaaatatgaacattaatcaactgactaaaaaaatgattaaaaaaacaaacgctctatttgtgagccaccaaggtagctaccatggttttacatggtctcaagtttaaataggaagcatctctgtagccaaaaatggcccatttaaatcaaaaaagaaaccagagtttaaaaattaaagtttcagatagtgcaaaattaaatgtgtttttcaagagcaaatttgaagcaaagtgagcctaaaagtagctacctatagattatatgtgttttttcctttaatttccttttttttctttttttttctttttctttttttttggtttttcatgacagggtttctctgtatagccctggctgtcctggaactcactctgtagaccaggctggcctcgaactcagaaatccacctgcctctgcctcccaagtgctgggattaaaggcatgtactactactgcccagccatttattattttttcttaggtgggttctatctatgaaaaataattagtggcatctcttgcatcatgtcccaggtacatataattagaaaactgttttttttgttgtttgttttgttttgttttgttttgttttgtttccagaggccttagcatcctttccacaagtcatttcgaagagccagtatcaaagcttgcagttaaaatctaattgtgtctcgcaggtctcccgaccagtgcttgttatccttacgcacaggaagatagtttatatttacagtaagaaggaaggaatgctggatataatcaaatctactctaaaggttcccaggccattgtggacaactcctgcttcactcacggaaagtgggatcttcagcattgcgcaccttctgtaggactggtttccactgtgtggcagaaagggagttatgaaaaccccttccagtttctatggcctgtcatttcctttgctactttggatatttgtcttcctggatctcattatccagtgtgtctccatctcataactcctaacatttgctcttctggagacctatacaagttattcctatttatacttttgtaaggtaacgcatgttacatgcagacaaatagtaacacaaatgtgtgtgtgtgtgtgtgtttgtgtgtgtgtgtgtgtgtgtgtgtgtgtgtgtgtgtgtgtgtgtgtgtacactcatctttctggaggtcttcaaagcagaaagttctctttgatagcttggccatttattcttcatttaagaccctgaagatattcattgtattatgtgcaaaatgatttacgagaccattgaatcaatacacatgttcagactacagaagtccattcaatgtgacttctaatttttaaaaacactagtcttgctgacaaggaaaataattgttaccacaccagatcaggttagtggtgccaaaaaaaaaaaaaaaaaaaaaaagtgggaatagaggttaagaggccatgtggatgtgagtcagcctgggaccgagggcaacactgggcctccactcactagactgtagatgctggtctctggataaggagggatcatccagggaagaccaataggacttccctcgaatagagaatgcttcctgtctcagaacagaggcagcaagcaccacaaggagtgagagaagggaaggaagaggtgagtttaaatagaaattaatagttgagatggtggtaagaggttgattaaaatatctctgtagtgatatttgtaaagatatttgtaaatatctttatgtaaagatatttgattctttaattgcatagtgtcaactgaagggaatagttgggctttcacaccgaacacgtggactgatatgtcctctttccttcttggtgtaattctgtggaatgtgctaatattgatgaaccaagtctctcaacataaacacacacacacacacacacagagagagagagagagagagagagagagagagagagagcagtatttttatggtacagataacagagagaaactaagaataatgaaagatttaaatatagtcttggagtgcttccttttgtttatgagttgacagaagcagagagagatggattatgttgatggcctgatgccccagctgctctgatcctcttttccatccctccaagagatcatttccattatggttcctggaactcacttgctcccttccctcccctcccgagcctcctaacaaactttttcaacctaataaacacccacatgatcttccagataaagctgaaaatgtttcctccagtgtgaaaatttccacaactgaaaattctagtaggtccaatttagtgagccgtctgtcctttacgggtcccctccctgtcagatgagcaggtagctccagtctcacatttcagagatggaaagctgagactgaggtgacttaactggttcaaggtcacacagctaggtttgaaaaccaaatgtaaacaaacccaggattcccccttcacagcaggcattacctactgatcatcttgctggagatttgcctacatgtttagctattctgtgctgatgtgttaatttcctaatagcacatacactgtctttctttctttcttttttttcttagcatgcaacattaaaaatgtatttttaaattcacttactattgatattctttgctttacactactcttctgggtacagtcacagagactggcagaaaattacaggtggtgtgttcacttttggaactaatacctgttataatgtctgccaaacaaaacctgctgcatatccagaacaaacaattgaatggacacatgaacaaacgtttttagcagaagatctaagatcttgcaaacagtacttgtaataaaaaaaatatttattgtcccattttctaatttagaaaaaaattcttaagcttatctgaaatgccctaccaatatcaacagttatgttggccaaatgaaatctgtacccaagggaaaatcatcatgggtgtggtgtgaacgtggaatcacttttccatttcgctcaatgaagatcctgaggctttttatcagacagttatacacagaggcaatgtcattcggagagcggttaggtggtttgaaacctggaaccttaagccttatattatcattgcagcgtctacaggtgaacttcattggtagccttctgagattcccatgagctttgaatcattaaatattgcccacccagcagtaaacttccaagtcctacatagcctcccactgaagaaagtaactaatatgcaaatcatatgcaaatcatgtaacgagtcccctttgcccaagtttctgttcatggtcagctggccccattgtccttggagtatggcgaatagggtatgttatgtcaggaaggtgtggcacagaaaaggctagttcacggcaggggagtgacagaaaagaggaagagaccttgctttcaggatccctccatcccatgatcagcttccaaacgctgacaccattgcatacactagcaagattttgctgaaaggacccagatatagctgtctcttgtgagactatgccagggcctagcaaacacagaagtggatgctcacagtcagctattgaatggaccacagggcccccaatggaggagctagagaaagtaaccaaggaactaaagggaactgcaaccctataggtggagcaacattatgaactaagcagtaccccggagttcttgtctctagctgcatatgtatcaaaagatggcctagtcggtcatcactgcaaagagaggcccattggacttgcaaactttatatgccccagtacaggggaacgccagggccaaaaagggggagtaggtgggtaggggagtgggggtgggtgggtatgggggacttttggtatagcattggaaatgtaaatgagctaaataactaataaaaaannnnnnnnnnnnnnnnnnnnnnnnnnnnnnnnnnnnnnnnnnnnnnnnnnnnnnnnnnnnnnnnnnnnnnnnnnnnnnnnnnnnnnnnnnnnnnnnnnnnnnnnnnnnnnnnnnnnnnnnnnnnnnnnnnnnnnnnnnnnnnnnnnnnnnnnnnnnnnnnnnnnnnnnnnnnnnnnnnnnnnnnnnnnnnnnnnnnnnnnnnnnnnnnnnnnnnnnnnnnnnnnnnnnnnnnnnnnnnnnnnnnnnnnnnnnnnnnnnnnnnnnnnnnnnnnnnnnnnnnnnnnnnnnnnnnnnnnnnnnnnnnnnnnnnnnnnnnnnnnnnnnnnnnnnnnnnnnnnnnnnnnnnnnnnnnnnnnnnnnnnnnnnnnnnnnnnnnnnnnnnnnnnnnnnnnnnnnnnnnnnnnnnnnnnnnnnnnnnnnnnnnnnnnnnnnnnnnnnnnnnnnnnnnnnnnnnnnnnnnnnnnnnnnnnnnnnnnnnnnnnnnnnnnnnnnnnnnnnnnnnnnnnnnnnnnnnnnnnnnnnnnnnnnnnnnnnnnnnnnnnnnnnnnnnnnnnnnnnnnnnnnnnnnnnnnnnnnnnnnnnnnnnnnnnnnnnnnnnnnnnnnnnnnnnnnnnnnnnnnnnnnnnnnnnnnnnnnnnnnnnnnnnnnnnnnnnnnnnnnnnnnnnnnnnnnnnnnnnnnnnnnnnnnnnnnnnnnnnnnnnnnnnnnnnnnnnnnnnnnnnnnnnnnnnnnnnnnnnnnnnnnnnnnnnnnnnnnnnnnnnnnnnnnnnnnnnnnnnnnnnnnnnnnnnnnnnnnnnnnnnnnnnnnnnnnnnnnnnnnnnnnnnnnnnnnnnnnnnnnnnnnnnnnnnnnnnnnnnnnnnnnnnnnnnnnnnnnnnnnnnnnnnnnnnnnnnnnnnnnnnnnnnnnnnnnnnnnnnnnnnnnnnnnnnnnnnnnnnnnnnnnnnnnnnnnnnnnnnnnnnnnnnnnnnnnnnnnnnnnnnnnnnnnnnnnnnnnnnnnnnnnnnnnnnnnnnnnnnnnnnnnnnnnnnnnnnnnnnnnnnnnnnnnnnnnnnnnnnnnnnnnnnncttcctttcttcttcctctctctctctctctctctctcctcctctctctgttgtatttccaacttgacccaagctagagttatctgggaagagggacctcaattgagaacattcttagattggcctatgggtaaacctgtaggatgtttttgcttgtttgtttgttttgggttttggttcttgagttaggttttctctgtgtagccttaggtgtcctgaaactccctcggtagtccaggttggccttgaactcagttatcctactgcctctgactcttgagtgttgaaattaaaggcatgtgccaccgttgcctggcatgtagggcagttttctttattaatgattgtactggggagcaccagaccactgtgggcagcaccacccctggagcaagcagtactgtgtgctgtgagaaagcaaactgagcaagctataaagagcaagccaggaaacaccactcctccatggcatctgcttcagttcctacctccaggttcctgccctgagttcctgcccggactgtccttcatttatactataagatgaaaattaaccattttcttctcaagttgctttttttcatgttgtttattacagctgcagatatgcaaactagcataccttatttgtatccttggacctattctctcttagatctctctctctctctctctctctctctctctctctccttgtgcaggctgtgttatccaacaccatgtatactagatggcgtcttaacaggcgagttcatttctcagcgttcttgataccagtacctccaagacaaaggcaccaatagctctaacatctggtgtggccctgctttcttcatagaaagcaccttctggccatatcctcacacaatgcaaagagcacacacaccaccttcccaacctctcttagaccagcacaccattagtcccaattagaagttctgtgctttcatgacctgagagctctccaaaaccttccctcataataccatcatcttggcgttattattttttcatcttcattttccttttgtggtacaagcacttacactaatagctaccctcttagcaaaatttcaaatacacagtagtggtgttctccagacgttaccttgcaagtccaagcctctgtgccctctgtctgtcacctcccccttacacctttctccaggccccagtgcccccaagtcttactttctgtttctagaataaccgcacattttagattcttcatgcagacaaggccatatactatctggctttatgtcccccggcatatttcacatagcacaatatcactcaagtcgacccatgtaattgcaagcaaatgatttcattcagttttgctgttgttctgggggttttattttgtttgggcctggttttgctctagtcgtcttgccgtacatctggtttttgatcttcctactccagaagccttccaagttctgagatgacaagtatgtgctgccatatcttccactgtaaaggctacacagtattctagtctttgtgtataccacgttttttatttgttcctgtatacatggacattaacattgttgccatattttggctaatattactagtgttttaatgtgcgtgagaaggcagatgccttttaagctccaagtttcagttcctgggggaggggagggtatatagagggaattgctagatcaatttattccttgttttgaaagtaggacattctctgaacattgctccaattgaagtacttattctaggaagtcagtctatttattggaaggataggaaaaaaaactggtaactaagaagcaaaatagaagtctatcatagggttcatcactaatgagtacattaacttgagggttgctgatactctgagtgtatttttaactttttctcaattaataatttggaacagatgacttagtgacacacgctagtggactaacaaaccagttaagctaagattcattctgagttaacaaatcaccgttgtgtatacaacactgaaaatttactgctggtatgacctgtttcctatctggtatgtggaggtagcacactacactcgaacctaaatgacctataggaccaaggagtaaacttcattctatctggaccagaactcagacctgtggctcctttggaaagctccatggtatactattacatagtgaatgtataaaaacataactaggactatctggtggctaattcatggaattcactgaaaggagatgaagggcggagagattgccttggctaactagcctaccagtgggtgaaaatcatagagtctggaaactatcaatatgtagcaaaaccttctgttttgaagggggcagaaatccagcgcacttctgtctctctcttttccgtgtccctccccccatccccaccctccctctctctctggcatctcggcatcatctcatctctcctttccttctgaccccaagagaaatattttttcactctcgtgtttctttacttaaagggcagcagcaacaatggcaaccaaaacaagcctttgagttctggcggcaatccaggtcaggtttttaagtagcctcttcctctgagtcgccttggaaaccgcctctatcctgtcatctggctcttcatactctgtgctcttctgcaaccttcattgaggatttccatgtcacacaaccgggactagtctgctctggctcttttgcagttttcattccccacccatttaccactgcaaccttaattgtcttcattttaatttttcttttagttggttttttgtatttttgttttgtttttgagtcagaatctgaaattgactttctcagaaggctgatattctctcaacctaacttgaggcacgtaatggtcagagtccatttgtgggtgtttttgatcatggatatgtggtttatagcctgccattcataatagaccacttcctaacctgattctggttctggccttggcccatctcaaaaattttctaactgattgatccatgccttgaaattttgtaccctgaaggaaaacgtctaaagtcattcggggaggaaatgtagtagcgagctcttgttgacttggaaatgttatggatagcatggatccattcagtagctaatgagttcattgtgcagccaatattagtgacttatctgtggttggcaaataagggtgaaacctgtcctaacaggaatgtcgaaagaggcaaagagtgaaacttttcatctccactgggagtgaaccaacttgccagatatgggccatcaatcatagtaaacgtgttcaaaacaaaccatacctcttctgcagctcattgtattcgtcagcaccatggaggtcaatggctctgacgagtcactcttggccaagttgccaacagcctgtggtttgggcagcatgcctaggctgtcttactcaaggatgtttctcaggtagttgaactccacaggccagtttcaaccaagtctgaaaggacaaaagggcagtcttgtttatgaggagtgacactgtatcacgcctctgaaatggtcttaaaagtcaaatcagtgggtcaaatgtctcctccagtcacttcgtgcctgctgcatgggtcgattaagagattgaatcgctgctccttcagtgtgctggtacacattgtgtaagcagaaagtacaagagcgttactcacatgaatgagtctctgtgtgtgctctgagtgtatgtaaggagagggcaggaactcaggctgaagaagtcacctcggtgttccttatcactggcccgatttccttatgcatgaatttggagataattgcaaacatgctaaaagaagtcacaagtagtataaaaaagttcaggcatataacactcaaattgatttgccccagcattctgcatcactggtctaatgactctctatttatgtgtgcacatgcacgtaggcatacatatacacccattatttttatttgatgcacctgagaaaaagctgcacaaatcatgacctcccatcactaaactcccccagttcatagtggaaaacccttagtaacaggacacttttctacatagctacagtatggtctcaaacatcagatggattttgaggttttctagcctaacatatttgtaacttttaccccaagatacttgggatcagtacctgggtacttaatggcggaaggcacaaactgctagttgaagtatagctcaagtgtctgggaggaaaatctgtatcacaatctgacacacaagaaaataccagcaggtgagcaggaaccaagtaggtacggattctagggaccagtcttatttagtgaaaatacaatggtgatatttagagaaagagacttccattaattaataagcattatctgtttactgatacatactatcagttagaataccttttctttcaatatttttctttcctatctatgtacctatctatctatctatctatctatctatccatccatccatctatcttatattcttctcatctatctatctatctatctatctatctatctatctatctatctatctatctattcatccatccatctatctttatgtttatctatctatctatctatctatctatctatctatctatctatctatctattcttttctcatatattataccctgactacagtttcccttccttccttgttataatctccagcatttgaaaaacagagatggtttctacttttaaaacatcattgcactgcttgctgacatcatcagttcagaagtagagggaacactggattggttatgaagggagcgggtctagagagtaagccattctaatacaagactgcagctatctccttattggaatgagtagtgaggttggctcttccctctaaatggcatttattgttcatattaattacttcaagaataggggcttacactgcaatgaacaaatgaattgatgtttatactccacagcccatacatatcattttgataactaacattgaagacatatggcatcctttctccaaggaagtgtaagcatgcatctctctgtccacccaagtgtatcatgcctcgggggatccaaattagacagacagtgcttcaagaatatagaacaccagagagattctctgtaggaggaaggcgtgattcaggaacaatttatgaaagatgggtgcgtccttagtaactgcagtagacattatagagacagtcctggaaagtcatctccaaactgactcaccgacaacatgatggttccccaagcatgcgcacatgtcaagtaatacgttaccttgtccccaaaaactctctcaattcaacagcttcatattgccgatcactgctccagggtttgaggatttagtgacaagtagccatggtctgtaacctcagagggattacatagaaatgcttttgctcagaaatgttgggcatttagaagtatctgtgcctggatcatgtacttagagtatgcccttcaatataccctccagcctttactcggatccacaagcatttagtttaaagttaagagatttgtaggaataaagtacattgatgttaaacgacaaaacatggagaaaagtttcttaaaggaccttccatcttttaatgtctttaactgaagcgttatgcttaggcggtattaatcaaggagaaatttgtaaacatctgctctctcgggtgtgttggtgagatggggagctgtctggggaaggagaagctcctgacaatgaggatagtgttcttcatagcaaggataccacactttgcttcctcacaaggctgggacgagttccaagtcagcctacaataacaagtgtctgaggcccccggggaaacttcagggtggtttttatagggttttattaggtgaatgttcttaaaaccattttcatacaggtctgaaacaagctgctaaccactctcctctagctgcattacctatttaaatcagagtaagctgaaaaccaatcatcttgatagccagtctcaacctggcctatgtgaacatacttcgttgagactgagttttcgtcctcatttgtttgggtgtttttgttagtatggatggcatttggctgtcaatgcagacagagttggcagaggtgcctcagatagccatagatttcttgtgttaaaaaatctgaatgactcaataatacagaacaccatccaacagaacattccagaacacatactgcttcgtgattgtcagttcgttagatgtggactctgcgccccgagtctactcctgttctaacctggctgctccagcttgagccatcactttctcattctaaccaggaagaaacaagataagcagacaaaagatacctggccaatagcttttagcgaaagatcctggaattgccagatagttcttctactatgaattcattcaccagaacctagccaagtgacagcgcttgaatacaaaggaactaaaatttccttcactttgggacagcagtgtgttgaaaattggaatctagtataatcaaggaagagaagcattagtaggaggagataatgagtagtctttgcctcgggttgcttactgataatgcagcatgcattttaagtatttgcggccagtccacagtgccctatctgtaatgcaactgatgggatgctctttccccacgtgagcatagtcatgtagttttcactcgtttttgtcaggccacctgacctgtacgtggggaaaaggcctaaagataaaatgtgctagaaaattttaatggcgcccagcagttgattcccagccttagagcgtgcatgcctactgggaactgggaaacgctggaagtagagaataaaagttgtttgaattctcctaaccgtctgatgctctttatattcttacaagctggcagcctcatctaagttagaatcacaggtacattttgaccttagctagagttctaaagttacacgtgggagagagcttcgtgtcccgacaagactgttctccaggaggcatggcaaatctgatagctacacactggcacctgacatggcagggaggtaattccttttactactgctacaaagtcttggattaaggtagacaatggctaccattttgcagacacgacgcagacatgccccttcataggaagactatctaatcacagggctgttttaagatagtttaaagagaaaccaaaacatgatgtagccaaatgttcctaaaaataagaagtaattgaggctgtgccatcactacaagaaattaaaggcaagagcaattacatccccatagtaaaaagagctcgctacattgccattgttactgacagaatgaagtgaggtgtctgattattttaaccagcgacggttttaagtttggctgtccacttatcccagatcacattagagggccttaactgattgtgacaaaaataagttacattataaaagtgcagtttaactcgagacccttgagtttaattactagcttagaattttcaaatgagtacggcttctagattacaatagatttatgagcatagttatcagctgttcctctttgcttgtgtgtacaggacggggacctcattctcagaatacactaattgtgtacacagaggacaaagccagactgtgcttccctgactacaaggaagatagatttggacagctgagtgatgggcagcaaatcttccgtaattagagcgtttgatttgacactcataacacagtactttttcatggtcaggtgtggggctatggatgatgtagctgggataacagatgccaaattgccaagttccagaccagttatgatgtataaactctttatatataagaaagagggactgatagatatctacaaataaaagtgatgatgaatacaggtgacctgagagtaaaagctctccacaagagaggggaaaatgaaagcaaggatggcgactccagtgatttcctctctcccttcgaacaaaacttactataatctgaattgtgagatttacaggtcctgacaaatcaagtgtgtattctttgaagagacccattactgatgctcggatatgatatcatacagcaatgtcgcagaaaggtagcctcaatgaggggacagaatgatccattgcaatttcagtgcagtcatatccaaaagcatttactgaacacctagtagctggcaattaacgtatatatgtaagtatatatttatagatatatgtagatatatatatgtgtgtgtgtataattttattttatatctatacatatatacatacacacatacacacacatatatatatgtgtatacacacacacacacacacacacacacacacacacacacatatatataccaattcttgcaaacattctagcaacaaatcattgtgataagagtatttagggatttggtgactttgagaactaacttctgatttgactcccgtgcatcaacatatgaattccattatactataaatacatatacatgtgtgtgtgtgtgtgtgtatccccatttcatagtaacctagattttttttcccagtgctctcttaatcctgcataatgtatcagaagtaaatggccaatccactccttggtaaggttctctcaacccagagcttcctgcctgtctcttttcaattctcaaacttgcccctaccaaccatccgggtcatcctgaccaaatcatggacaaactggagatctgggatgtcagagagatgtccacaattagtgctcttacttagccatttccagaatgagaaggctaaatgattgtcacctttcagtgataacagtgtctctgggaggagcaaagtgctgaagagagctcttgacataattaaagtcccaacagggctctagttgcctgcacacagaattcataattttacagctttctgggaatttaccacttttgaggtgtggccactttatagtgtcttatttaataactagaaacaacctctggtgttcctatactagtagctcttgtcattttacaaactagagaagaaagctatgtaaattaattctctcctacagtgtctcaaccttatatggtgctctctgtggtgaagtctagagacagagatggccttattccgtaatctgacatcttgaatggtacctgcctaggtgggtggatcttccctcatcaattaatccagtcaggataatcccgcacaggcatgtccagaggctcatctctcagacgagtgtagatctcatcaagttggcagctgacattgcctggcccacaagaactccagaggaaactgagctgaaggggaagagggaggcgatgggagcagcaagcaacaattcaaagtgtaacaaatcaaacaattcaaactgtaaacctgtgtcaggttcagaaaatgctgcatcctcttcgcttcttcagctggaagcccacaggttttcttttttgtttgtttggtttctttgttttgttttgtttttttgtttttgttttttgtttttttttttctttgtttgtttttcgagacagggttctctgtgtagccctgtcttggaactcactttgtagaccaggctgacctggaactcagaaatccacctgcctctgcctcccaagtgctgggattaaaggcgtgcgccaccaccgccctgcttgcccacaggttttctattctgtctctaacaatggtctctggaatggccatttccagacaatgaatcctgggcatcatcagctttagactggtaaaactttcctatacatttaggcactttggctttctttctttctttctttctttctttctttctttctttctttctttctttctttctttcttccaccctcctttgctccagcattgtagctcactggctttgcctccattacaccgaggcttccaccatcaacagtttggagacgttgagaatgaagacacagtttttgttcattgtaagaaagaggccaagagccagaagtagtctttgctgttttcgtgaaccacactgtcctctagaccgtaatccagtccgcaaaacctggtgtactgacaccctccccgggagccatggccaggtcccatgacctttgttaaatgtccctgaattccgcttgtcctgactacactgtggaacacagcctattgttgctttgtcaagcagtgcctcaagattgtgaacttcttaaagccaaagatcttctgattatagttctgtacatggaacatctcacagaatcccgggtcctctgggtactcaacaaccttttattgagcgataaaaagtgaagcaaatatttcaatagacacgggaggatcgtagtagnnnnnnnnnnnnnnnnnnnnaaaatgagtatacatgcatattccaggacttcttatcatcaataactttattttcctaaataatttatattttagttttaaatatgaaatgtacacacccatcccataattggactcaatcccaataagtgaattgtgtcttgtaggtattagaatgtaaaaacttctatttcttcaatatccttcaatgaataatattgttcataattgcatacatgtccatggagtccatttgctggatatgtgatctcaactggctcccactccaggtctgtgaatgaaagcccaacccttctcacagcgagccagagaagcccactgctgttgctctgctgcactagcagcttaggcagacgtttgtacttcagacaaccaggtgttaagttcagtctcttcaatgaattaaagcaactcagcatttcagtacctcaaccagttttgtatagacagaggaagggaaatttatagtatgccattttctcataagccaaattatctatctatctatctatctatctatctatctatctatctatccatccatccatccatccatccatccatctattatctttctttctcccttttctctggggaactggaactccttctgcctcacatctcatggagtagaggggaagagctggtgctcacgtggcttgttgctctcacccttcttagccgcctggctgatggtctgatgctgctcacacttcagaaggctcctggctcttccatcagttgtttcctagaaggctctcatagactagcctgaaggtgctgggtgcttttgacaatctccattaatagccatgttcagtttcttttctcaagattaaggtctccctgccccacttgtatccagtgtgacttgaatgcccccttttattgtcccatagcctattctcctccttccttttctactgtatggtgctaaaattgtcatcgacgatgggctctagtctcgcattggataagggtcacactcttacacacttcaaactctaataaagttcatggcacatagtgtctcatgaacgttgagttattgatgagattagaagttaatagacctcaatccatttgcaaaattctactagagcacttgtcaactttaggaggaaaaaaaaatcatagctagtggcaaataggaagaaaattcattaaaatgacacaacatcttcactttgaacatatctttgaagccaggggtgaaagtttatatatttgataagatttaaaaatacttcaaaacaataagtnnnnnnnnnnnnnnnnnnnngttgcatgcaagagacacctgttatttttttacttaatctttttttgagatggattttactatgtttgtcagtcttatctcaaacgcatacttttacgctcctcctgcttcagcctcctgaatgctggggatacatggttttgccaccacgcctggcagtgtttaattattctaccttgaaatgatcaactcctggtgggacttgctacaatactactcttaggaaggtttctgttaccaatggtcaaggctgttgataggaaaggcaagctcaagtctgtgagatgaatcaatgggtgaacttcttgccacctgagtacaagggtctgacttggaatccccagagcccataggagctggatatggatgcccaggtatctcactgctcctatggtaagatggaggtggaaacaagaatcccaggaagctactgcctaggtagcttggcatacctgtttcaaataatccagaaggaacaatagctgaggttgtcccgggacttccacgcataggctatggcaaacatttgtccgagtgtttcacatacacaaatacacaacgtgcgtgtgcatgtgacagagagtgagacagagacacagagagagagagagagagatggagacatagagagtcagagtcttatttagggttattatcactgtgatacaacaccatgaccaaagcaacttagggaagcataggtttctctggcttcagcttcccatcactgttcatttctgaaggaagtcagggcagggcaggaactcaaacaggacagggcgctgggatgagatggagacaatggaaaagactgttgaggactgctgcttactagcatgatatccctggcttgctcagcctgctttctaatggagcccatgaccattagagtccaggggtggcaccacccacagtgaacttggaccttccatatcaatcactgtagaaagcattaagaaagtgccccacagggttgtccacagcctgaccttatgaaggctttctcagccgaggttcccaggtttctctcagacgactctagcttgtgtcaagttgacgtacaactaggcagcacacctgaacacagacagacacacagacacaccaacggtgatggtggagtagggggtatgatcactaaagcctatgctcttaattgtttgcttcttaaagtgacatttaaaaaaatggggtgttaataatttaaatataggattttgaaaggacaaaaatctagcaacagacggccaacattccagttgtctttgtgctctctgcaaccccactaaccggaaccattttccttcgttcatttattcattctctcaatgtggtggcttttatagccacttagtgagtgccctctgctttctatgcccagctggcacacctatgtgctccaagagaacacacaaatgtgtggagaacgtatttataaatgcatacctgttagacagtgtataccacagagagcccaatgctacacttctcacatgaaggagagaagcagaggggagggaggaaacacaagaataaaactagcactcatcaggcaggctatctctgtctcttatattttcaaattaattggtatgcttcaaatccaacctagtgggtcatatctacactttaatagattacatagagtagaaaacaacagagtgaattgggcattataaggaaaatgttatttcacatgaggttctgtttccattctctgtacactggattaaatgtgaatctgtatgcattatatatataaattgtgtatatatacacacacatacacatacttatatttgttttaataaatattgttttatatatcgattgaacttgcatcatatatgtatatattgtcttattcctttaattcagttaaactgaaatctctggcttagtagagactctatccacaatttctgacatgaatatatgtatatacgtgtacatgcacactcatacaaaacataagaattatgttgaataattttccagttgaaaatattgaatcattttccagtaaaatagtgaatgtgctatattattgttaatttgttagttgtgtttagtttttgagaggtacagggagctgtggtctcccatcggtatcaaaaggacacaccgaagcaagattgtctcttagtactgtgtgttagtaagagataggaagataactgtcacaaaaaaagcagctcttgtgaattacatgtagtagacttaataaatattttacaaatacattacacatttaaatttaagccagtccaattaaaaagaaataatgatacggatattattatgatagtcttaaaagtccaataaaaatcttaaaaatccaacaaaatgtgtgaaaatggctggactaaccatctaggggatatgctttggggcccatacaaaggaacaaactaaaaatacagagaaaacactttgcccaggttttccacatgatgctggctcaccaagctgctgtttgaaggcattgctctgggacctatgatggcagcatctcagggcacgcctccaggagggtgtggcttcctaatgcctcaccttgtctctagtctctcttacctcctggaccaagcagtgcacttccctaatcccacagtatctattggctcgaggccacacatttatgttttctacttatttttccctcctctccctggaaggaatatcttctacttccctaaccgcccgcccaggagtgtaagcagtgcccccacatgaatgatttgtttgccacctcagactgtcaggggacagcagctgatcttgtgtgtgattttctcagcaggatagtgtaaaggctttcctaggtttatgccgccgaacctttcatgttcttgaatttcacagcaactagcacatcacatagaggctgtaaatatggatggggattttgattgctctttgaagagaagaaagaaagaggaaaaaaaaataaggagcatcccttacagttttcaatggcatgcatcatgaagggggggggggcaagcacagctatacatacaaacttgcaaacctatctactctggaggctgaagcggatggataattcaaagctagcttgagcaatgtagcaagatcccatctcaaaaataatatatacatacaacatggatgcatacatacatgcatatatacttggatgcatacatacatactagggctatagagtcaggagggatgaaattttaaaaatggagatatccaatatgtagaaacatatgtgttaaaataattatgtttatcttgcagatttatttgacatatgggtcatagggcatgttttaaggtatggtttatcaagagatgataatggcagagggaagaaaataatccaaagtttagatgacacttgttaagtgacattaaatgaaccatagactgtctggcttctgattggttcacatccattacaaatctctgaaaagcagctgcacaggtgatttctcaagcttgtttagccaaagatatctatttgcaagaatattgtaatagttggcttccccggcacattctttaggatgtttgtggcgatccttcttgtaacctctttgtaagtgatgctcagctgtgacctatcctgtaccctcattatattttcatgtacagtgactgtacatggtttgatacaatctaacaaaggcttcgctgggtctgaggttcttcattcacattcaggtcttaattggttagcacttgagttttgatgtaactgatagaaatttttaattgttttatgatcaggaatctgaataagagtgttcccctagtctaaatatcttattatagattttgtaaggtggatcaggatacttattgctgtttttgtacatactatatatatgtcagatactgcccttggagttttacatgtattttcatatttatttttcataataattgtgcaacctctaattcatgaaatagagacaaacgtgcaagtgctacataaagatcacgtagaacaataacacagctcgaattctagagttctaatgctgagtgattcagggccctgctctttctggtttgacattatacttccctgaggaaccatgcagtgaataaatattaatataagaaattgctagccgggcagtggtggcctttaatcccagcatttgggaggcagaagcaggcagatttctgagttcgaggctagcctagtctacagagttccagaacagccaggactatacagagaaaccctgtcttgaaaacaaaacaaaacaaaacaaaacaaacaagaaaaccaaacaagcaaagaaattgtctttctgaggctctgtccacagtatacatgattttcttttctttttctttatgtgtgctgtcttagggtttccattgctgtgaagagacaccatgaccaaggcaactcttataaaagacatttaattggggctagtttacagttcagagattcagtcctttatcgtcatagcaggaagcatggcagtatgaaggcagatatggtgctagcgaaggagctgggagttctgaatcttgttccaaaaggaactaggagaagactgtcttccaggtagctagcaggagagtctcaaagcccacccccacagtaacacacttcctccaacaaggccacactactccaataaggccacatcttcctgggccaagcatattcaaaccaccacatgcactgtgtgtgtgtgtgtgtgtgtgtgtgtgtgtgtgtgtgtacatgtgcatgtgggtgatcagacacatgcttctgtggagccgggtagagattgagtgctttccttgattggcctggacttaattttctgtagcagattcatttcactgaatctgcagctcaccagttcaggtagcttgctgtgacatccatgtcttttcctcccaagtgcaaggattacaggtgagccaccatacccacctgaatttcatgtagatgctggggatctgggggctctgatatttcatgtttgcaaggtagaaactttgttcactgagccatatccccagccctggctttaacagttctaaaagctttatctagttaaaaaaaaaaaaaaaaagtcccagtctctttggaagtgtgtgtgtgtgtgtgtgtgtgtgtgtgtgtgtgtgtctttgtgtgtgtgtctttgtgtgtgtgtctttgtgtttgtgtgtatgtgtgtgtgtgtgcttgtgtgtgtgtgtgcttgtgtttgtgggtgtgcttgtgtttgtgtgtgtgtgtgcatgtgtgtgtgnnnnnnnnnnnnnnnnnnnnnnnnnnnnnnnnnnnnnnnnnnnnnnnnnnnnnnnnnnnnnnnnnnnnnnnnnnnnnnnnnnnnnnnnnnnnnnnnnnnnnnnnnnnnnnnnnnnnnnnnnnnnnnnnnnnnnnnnnnnnnnnnnnnnnnnnnnnnnnnnnnnnnnnnnnnnnnnnnnnnnnnnnnnnnnnnnnnnnnnnnnnnnnnnnnnnnnnnnnnnnnnnnnnnnnnnnnnnnnnnnnnnnnnnnnnnnnnnnnnnnnnnnnnnnnnnnnnnnnnnnnnnnnnnnnnnnnnnnnnnnnnnnnnnnnnnnnnnnnnnnnnnnnnnnnnnnnnnnnnnnnnnnnnnnnnnnnnnnnnnnnnnnnnnnnnnnnnnnnnnnnnnnnnnnnnnnnnnnnnnnnnnnnnnnnnnnnnnnnnnnnnnnnnnnnnnnnnnnnnnnnnnnnnnnnnnnnnnnnnnnnnnnnnnnnnnnnnnnnnnnnnnnnnnnnnnnnnnnnnnnnnnnnnnnnnnnnnnnnnnnnnnnnnnnnnnnnnnnnnnnnnnnnnnnnnnnnnnnnnnnnnnnnnnnnnnnnnnnnnnnnnnnnnnnnnnnnnnnnnnnnnnnnnnnnnnnnnnnnnnnnnnnnnnnnnnnnnnnnnagagagagagagagaatataaaagagataaaaatgaatatatctagggagccatgatcagactatattgctgcttgaatctgacttggaaaaattcttatgtgtttcaaaacaagaatacttctcgattattgacatacaactatctttggaaacctgtaaatgtgaggatctatcctagacatctcttctcttctcttctcttctcttctcttctcttctcttctcttctcttctcttctcttctcttctcttctcgtctcgtctcgtctcgtctcgtctctccccttccctcccctcctcttcctttttttttcttttcttttcttttcttttctgcctaggtacaagtgcagaaaatcacagagacaaaagctagcaaaatcgcatctaagttgaacaactgaaaaagtacagttgtaaatgcactggttaagaaattcgagttttgtaggagaaaatgcaggcatgacctggctgactgacctacctggcacactgtgcctctaagtaagaaatgtggtacactgtgctcctgagtattctcagaagtcagaacactgaattctgaagtagcttgagtaactgccctgctgctgacgtgtcctccatctccacgtgtcgttttacatacttcttcctcagtacagaccctggcggtctgagtgctcaccgtccagtccagggctgtgctaactgatcacagtcgataggcttccaagtataagtagtcgctcatgtgcataaagcagacactcttccctgaaaccatctcctgagtgtgtcttccccacacctttcaccaacccacaggcattgcagtctcactgggggatgctaatggcagagttgagaaaggcggttaaagcaagctgaagagaagtcctctgtgaacttaagtgtgataatagtcccaggagaagggggtttgcacatcagactcatgaccaaaggcatgatgtgtgaaaacaaagtttatccaagacttttttgatcttctaaagtcgtgtatcctagaaaaagtgaacccaggaagacgctaaaatgttgtaaccgtgtagaaatgaacagatggagatttgattacagtgggtcattgtagaaattaagaaagtgttgagtttattggttaaaaattaagtgggaatatggcgggtgtgggaaggggatgggcagaaatgagtatacatgcatattccaggacttcttatcatcaataactttattttcctaaataatttatattttagttttaaatatgaaatgtacacaccatcccataattggactcaatcccaataagtgaattgtgtcttgtaggtattagaatgtaaaaacttctatttcttcaatatccttcaatgaataatattgttcataattgcatacatgtccatggagtccatttgctggatatgtgatctcaactggctcccactccaggtctgtgaatgaaagcccaacccttctcacagcgagccagagaagcccactgctgttgctctgctgcactagcagcttaggcagatgtttgtacttcagacaaccaggtgttaagttcagtctcttcaatgaattaaagcaactcagcatttcagtacctcaaccagttttgtatagacagaggaagggaaatttatagtatgccattttctcataagccaaattatctatctatctatctatctatctatctatctatctatctatctatccatccatccatccatcnnnnnnnnnnnnnnnnnnnncatttgggaggcagaagcaggcagatttctgagttcgaggctagcctagtctacagagttccagaacagccaggactatacagagaaaccctgtcttgaaaacaaaacaaaacaaaacaaaacaaacaagaaaaccaaacaagcaaagaaattgtctttctgaggctctgtccacagtatacatgattttcttttctttttctttatgtgtgctgtcttagggtttccattgctgtgaagagacaccatgaccaaggcaactcttataaaagacatttaattggggctagtttacagttcagagattcagtcctttatcgtcatagcaggaagcatggcagtatgaaggcagatatggtgctagcgaaggagctgggagttctgaatcttgttccaaaaggaactaggagaagactgtcttccaggtagctagcaggagagtctcaaagcccacccccacagtaacacacttcctccaacaaggccacactactccaataaggccacatcttcctgggccaagcatattcaaaccaccacatgcactgtgtgtgtgtgtgtgtgtgtgtgtgtgtgtgtgtgtgtgtgtgtgtgtacgtgtgcatgtgggtgatcagacacatgcttctgtggagccgggtagagattgagtgctttccttgattggcctggacttaattttctgtagcagattcatttcactgaatctgcagctcaccagttcaggtagcttgctgtgacatccatgtcttttcctcccaagtgcaaggattacaggtgagccaccatacccacctgaatttcatgtagatgctggggatctggggctctgatattcatgtttgcaaggtagaaactttgttcactgagccatatccccagccctggctttaacagttctaaaagctttatctagtaaaaaaaaaaaaaaaaaaaaaagtcccagtctctttggaagtgtgtgtgtgtgtgtgtgtgtgtgtgtgtgtgtgtgtctttgtgtgtgtgtgtgtctttgtaagcatttgccacatatgtacaggttccccggggaggccagcagaaggcgtcagatatactggagctggggttatatactgttgtgagtacttcacccatactgggaagactccattaacaaactcgttgaagtctttaggacaacccttggtctatggagctatagttttttgttttgttttgttttgtttgtttttctctttgctggttggcatcttggcacagcccttatttcctaggggcctctctctggttcttagacttaggcctctgaatctcagacacagcagcagaaattcttttcatgctgatgggttttcagattttcttcaactctcttcttcctgtcctgtagcatgtctttcactagggacagagaaagttctctgttctcaatggctttatgattaggttggctctacctggacactgtaggagagtctccaaatataaaggtcactaaccctaattataacttatgaatgcccttttggcatataattgatagattccaggcattagagtatgggtgtccttggtatgaggatttttctgcccaccatcaagagaaatattttttagagtaagggaaaatagtacttgaaggatgactaggagacatatcaaacaatccttgctgaagaaaatcatgaagagtgtatttgaaatagaagaaatatagttcttgaagggaagtatgagacataagaaggaatgaaaagtgagaacatgacaagnnnnnnnnnnnnnnnnnnnnttggttaaaaattaagtgggaatatggcgggtgtgggaaggggatgggcagaaatgagtatacatgcatattccaggacttcttatcatcaataactttattttcctaaataatttatattttagttttaaatatgaaatgtacacaccatcccataattggactcaatcccaataagtgaattgtgtcttgtaggtattagaatgtaaaaacttctatttcttcaatatccttcaatgaataatattgttcataattgcatacatgtccatggagtccatttgctggatatgtgatctcaactggctcccactccaggtctgtgaatgaaagcccaacccttctcacagcgagccagagaagcccactgctgttgctctgctgcactagcagcttaggcagatgtttgtacttcagacaaccaggtgttaagttcagtctcttcaatgaattaaagcaactcagcatttcagtacctcaaccagttttgtatagacagaggaagggaaatttatagtatgccattttctcataagccaaattatctatctatctatctatctatctatctatctatctatctatctatccatccatccatccatccatctattatctttctttctcccttttctcctttttctctctctctctctctctctctctctctctctctctctttcactctccccatcaatgaccttgttcccatactttcagaaagtaacttgcgagatagttttaaaaaagagaatgcaagtaccctctggagtcatactgggcaagtccttctatttatgtctaacaaatgtaagaaccaaacccctccataggatttgcttgttttggtttttcgaagtcactgtgtgaccctgactggcttgtaactgtctttgtaggcaagaatggccttgaactcacagagatccactgacctctgcctccttcgtgctggaattaaaggcgtgggccaccatcccaactgcttctctgggattttagtgcagagattgtcttagattagagtaacagccagagaagcaaacaatcttataaagtaatatgctaatataaatatgtccaaaggtaatattctcattcactggcctaacctcctacaatctcatgtgttgtgcaaccctagagtattccatgtcaactaagacaagatccccacgtcacacggtgagctgagtgattcagcagctctgacctgtgaagacagtccaacattcctacctgctgatcagtgagatttgcatagccagtgtctactgatgtgtcagatttctcagacttccttccaggcccctttcccctgagcaaggctctctgtggccattccttctctgtgcccatccatgagcctcaactgtctataggttcaggtgtttggattagaaatatcctttctgccttcctccgttctcttctatgcattagttacttaacatcgtgttgtaacaaaatacctgactaaaccacataggcaacatataggaagagtcagcggagatacggaaggtgtggtgagactcatgaaggcaagagcgtgtgactggaactccttctgcctcacatctcatggagtagaggggaagagctggtgctcacgtggcttgttgctctcacccttcttagccgcctggctgatggtctgatgctgctcacacttcagaaggctcctggctcttccatcagttgtttcctagaaggctctcatagactagcctgaaggtgctgggtgcttttgacaatctccattaatagccatgttcagtttcttttctcaagattaaggtctccctgccccacttgtatccagtgtgacttgaatgcccccttttattgtcccatagcctattctcctccttccttttctactgtatggtgctaaaattgtcatcgacgatgggctctagtctcgcattggataagggtcacactcttacacacttcaaactctaataaagttcatggcacatagtgtctcatgaacgttgagttattgatgagattagaagttaatagacctcaatccatttgcaaaattctactagagcacttgtcaactttaggaggaaaaaaaaatcatagctagtggcaaataggaagaaaattcattaaaatgacacaacatcttcactttgaacatatctttgaagccaggggtgaaagtttatatatttgataagatttaaaaatacttcaaaacaataagttgattccagaaatatcctaggaaatgagggcagcttgctcttggctctcaggcttcaacatgttacatagacatgctgagagaagctagggccttccttcatgtgtttctcatcagataaaatgcaatagagctaacctggacagatctttccctgtagcagagccaaagaatgactagctcacatgggaggcagaagtctacctcctcctcctccggacaccatcaattctctcactaggaacaaaggacatgtaagtgaggattggctgaggagaaactggaattaattaaaaagtcatgttcgagcattttctcttagaagctgtctgatgtatttgtttcaatttaaaagcaatcagaatcagctgtgatcgctctgtaagactttttaagaagagttgcaaatgacacccaaagtttgtgttctctctctctctctctctctctctctctctctctctctctctctctctctctctctctctctctatctggtttttagtagtaggccgtaggcctctctaggaatgacaacagacttatactgacctttagcctcacaaatattgacaaagaaactagctagcatttacaaagtttcatgtcctgtagcacagatctttttgcctctcagtcagttgtgggtaagagtaatgggtccaacatttcccaaggaggctgagtacagcctctggccaactgctgtggctcctagctgacggcgcttttccctttcaaagacaagctgctgcttcagcatcctctcctggagtccttggcaagatttcaggccatgtgtcaggggaacccttgcgcacattactatgacggaagccaagtgctggcccacaaatattgagtattacttatacccaggagagttgaagcagacgcctgggtatggcacagctcagggtgccttgaagaacacagaataacagaacccaccgatgtttattgttactccacagctgcctgtgacacagcccttttgcagtccacgtggagtttagccaatagcgtttggtggggcattttcctctcagtagcccctcaaatgaagcaagattcgcacagttaaatagaaaagttttcatatatatttttaagtagggccacagcatatacgaccccctagggggcactctattaatgaatgcaacctgtgttcttggtaaaggccactattaaactggttcgctgtgtttggccagctagctgccgatggcatttaggtgtgttgtttggtggggtgactcaatttcctgtaggatagctggcaactccacattgaattctcccactcgccaggggaggagggatagaaaggtcagttaggccttgtcttagaacagtggggtttaaaatgcctgaacttgaagacataataatgaccctgaaaaactgtagcttgtcacactgtctcagtcccggagtttgaaagaagtaaattctaacgcgacaaacccagcattggttttataaacgaaatttgtttattccgccgtatgtaaatattctctcagcagtatgtacaaatgctggaggttaatttcattctttaaatacatagagagcatgtggaacatttttgaacgtatgtatgtgaccttacttgatttctgatagtcaaaatggctaagccatgacttcaatataaactggatctttggcaaccaattgctcctcacgttgctataccacccacttaaaggcaaagcccatgtctaagtgtcttgaaacattaaattgaaactttccggagttactgtttctcataaaaaaaaaaaaagactgaaatataatacatagagccatattctgctaggtccgaggtctgaattctacttctgatttcagaaagctttcatgaagatcgccaaggtgggggtaggaagtatacgccacacactgggaggtcccctggaactcttgctttctcagagtcgggtggcagaaggcagagacatcaagtcttaaagatgtgcagagaggatgtttggcttgggataactaaaaaaaaaaaaaatgacaggagatggattctacacaatagctatgcctctgaccgcacggcatatacaaactatgaacgtctcacctggctttatgttaatttcctccttcaattttctgactgcctgttttacatagagaagggaggaaagcagaaacaccggaactgtataagaaacagaccaccatggcgtccagtcagtgctccacttacatatggaatggattcagtattttgaaatattaaactagtgtttcagcgctctaggttgtggggccacaaaggactctccatgtttgcgcatctttcttttacagagccaacttgtaatattttgcagttttgtgatcaggaaaaaccaaacagataaactatttaacacttaccttgtacagttatctttaagatcgtctccattgttaaagaaagaaacatcaactttaaatttcaattcaggaggtttaaggaattgctgacttaaggtctctttagagattagtgaagaggggacgcacaattagaggcaaatttcaatactcagcagtcaaaatgacgagcatacagttcaataatgtcagagaaggacaagccaagaagcaagtctcacacactctaaaagttactgaaatttttacaaatgtaaggaaatctcagaatcctgagattcaacccaccgcattctttgtcccgcctgataattaatggagcctacattggggcagaacttctttcccccacaatactgtagatcagaaggggaaaaggagaaccccaccacttcacataaggcttttcctttctcctgccagttttgtaggctagacccctggggtttcaacttttctctttctgaaataagattgctgttcagtttcggaactgaccggcttagggaaagtggccaagttccctgcgtcagcttttatcagcagaacccattgccccatagttctgacagtccatttcgtccatagtgggcagaaaacagactactagactttctgtcttgagccccaagtctagggtgttcttgtgttttctgcagaggagacaccccagcagggcatgtgtaaattccccttgctccttggttcgttcccattgctgttcctttaaggtagctctagggtaattctgaaggtgaaatgtagcctgttgtcacattctaaggcattctgtccccacaacattatggtttgtctgtttacatctaacccaaattttagaggggttggctggatactgacagtctgtccccagtagagacgattttattcccacaattccctttgagtaagtaaatcctaacctttgggacacaaatccatggaaactcgcaaacttaaattaaacctgcatgcagaaagggtagtgcctgtcctaagtcaccttgcaacccaggacagcagggcctggcaggcggcgctgggatagagggcccgggactccgctgtgcaccccagggtcccccgcggggcaggtgcgcgattgcacgcgcctgcgcgctgggggccaaccgagccccgcctgagccccgcggggaccccaggcggcgggcgctccacgccgggttttccgctgctctggtgcaagacagctccacagcagcgctgcacacacacacacacagatacacacacagatacacacacagatacacacacagatacacacacagatacacacacagatacacacacacacacacacacacacacacacacacaaacacacagatacacgcgtgcgtggctgcgcctccctccgggctgcgcttcagagcagcggcgccggctgccttggggcgatgccgcggcgaggtggcggggagggcggtccggacggcgtattgcaactcggaaccctttcgtaaggagtcgcgggggagccagacagcgccgcggggccgcgaggggcgcaagggggagtgttcccggaaagccagcatggagcggcgctgcgcccgcccgcccgcggacttgagcgacaaaacaggaaacggcggccgcagctgattcattcgcttcgcgcgtggggctcgcggcaggcggcggcgtggagcccggggctgcgggacgcggacgtcccggagccgctcgccggtctgcggggcgagcccctgctcccaccccctccccccgagccggccaccaggggcagcatcccaacgcagggaagcccgtgctcgcgcgccactgagaatccgcccgccgtccccgtgccaaagttggccttgcagcactttgcgcccctccctggaggctgacccgcgacgtcaagctggagcatctcagccagcctgagcccggccccactagtccaacctcagccccccgcgcgccgccgggccctgcaatatgaaggagcagccctcatgtgcgggcaccgggcatccgagcatggcggggtacggcaggatggccccctttgaactcgctggtggtcccgtgaagcgcttacgaactgagtcctcctttccctgtctcttcgcagaggaggcctaccagaaactggccagcgagaccctggaggagctggactggtgtctggaccagctagagaccctgcagaccaggcactccgtcagtgagatggcctccaacaaggtaagcccctgttctggttctggtgtcagtgacgcggctagactgctgtttcccacgctggggaatcaccgatccctgtgacctggggaaatacagagaaaattttgtcacgttgactgcaagttagctgttctgctcctctggagggaggttcctgtttgcacacctctcttcaggtagattaaacattttatttgcaaaaccaactttggcagagttcgagtatccctaggacgaagggtccttagagtgacattttgcccttgaagcagaaacccagtagggtctggtggtggcgttgcatatcatcaaaggcactgcttaagattgcttgttggaaaaaagcgttgcaggactcagtgaaggcaccaggacgccacctcctacctcgctgaaactctgaagagttcactgaacttgcaaccctcactcccatttctctggttctcagggtaccttgggaggatggagcctttaaatattctgttccctgtatgtaccatctgcagagaacaaagttcggagggtcttatgctgcctttgtctccttcggtcttggagaacaggtccaggtttctgaggtcatttagccgccactaggcttcagctgggcatttgtgtcatgtgtgccaaagcgctgctggtcttggcaattaatgaagtaaccttcagcatcaggcagctgttaagcagcttgggagataaggtagaatacttccagagttacatgtaaaacaacaaaatcatgtgttttacgtcttcggctatgcaaagaaataattgagattatgtgttttttaatgaccgggtggcctaggggccagggaaggaggcttctacgtatttgatgcaaacggccgaacgagtcaatcaggatctgtggcagttagaaggagttgtctctgtagacggttcttgtagttttggacacctctttacaaggtcaagagggtggtgacattttgcctcttgtatccctgtctgtcggtgaatgatgctttctttttttggttctgtttgctcagcatggtttctttcccacctgctttatttctcatgcagaatatatatatatatatatgccttagcttgtcaggcagccatgggattgttgtatccagaacacttttcatagagttagcattgttgctgaagtgaaaagttggcctttaactaaccgggctccccaaaagtactagctcaccggtttgtaccatattgataatcaaatctgcattcttgcccttttatttttccccctgtggtcatctgggcctcatttctaaattcagctcggctcttcattccaatgacagttactgctttctactaggactattacctccgagaagcagcattgagtgccattgttctcctaggactaacaagctgtgacatttgttaaaatataaccttatctttttataatttgctttataaagcagaagacacatgctgaatatgtccagtgtcttaagcgctgagcgggccgttatcggtaagcccgtgttctcgtatctcttgtataaatgtggcaagagacagatcaaactctgaaagccccttggccagatacatgcatttgcctgttatttcagcctcatttgacaatactttcaacataatttgaccacactttgcatgcactttccctaaaatccatattctcgatggtgaaacctgcatttgagtttaataattgatgtgagatcgaacagcatcgtgacttaaactgtgaagtgacttatgtctgtgttttagactgaaaactttatgtcacagggattgctcaaaataatgcctgtcttttataggcaccaaattagacagggctgtgtcttttttaaaaaaagaaaaagaaaaaaaatcttcattgaaaaaagttttcagactttgtaatagctactacaggatcctatgggaggtgggttaatttggctgaagtgagataaaggaagagttcttcacaattcttcaaattttgcaattcttcaaaatgcattcagctgtgctgatgcctggtggtcaaaggatcattaacatgacacattaaatattattacttacatatataatattgtacattatatattataaatactaagtacgtttgcccagttaactattgcttgaagttttagcgtcaaagccattcattgccttatgaatccactcattcctaaacccttgagcccctttcagagatgagaaagttagcttagagaaaaaagaaaagttcctgagagtggttgtaacgtcagccttctacttaataaacaagccacttccacccagtgataaaatgtgttggaacaactggtcaaccaagggctgggagagacagcctgccttcattttggctggcaatgtgaacagcttccttgggctattatatctgagtgaatgagtctggcaagttacttcttggttgataaatttattgccctatattcagttaatgcaatcgactcatttttcttttgccttgaaatatcaggatagtattctcctctgtggaagttttaaacatttttttcctaatattaaaaacacaataatgcacgaataagacgtctagattttttttaaactgataacagacaggatctattatggaggtgatttggcaggcagaaagcggggaagccagatctttaagcctgctaacagagaattcatatagttaaaagatctcaataaaaagaaattggcaatgattagtagctttaaggtgatgtctagcagacaacatattttctgtgttgctgtcacagtgtacacagactgcttgctcaggacaagaatatggttgaaatcttggccaaggcaaggggtggctgtaacacatgctagatgcttgtattggaggcgtaagagattccagatggcatttaattttgagtgattacatctacagcatttactctcaaatgcacattaatctgcctaagagttgtacagatttccctccccacccccatcccctaccccggaaccagcaattgagggcaatttcagtgaggcctcagcgctttagaggcggacagacctagaagttcactctgtgttttattctcttcttcactgagttattaaaaaaaatcataatgtaaactttttaagctacactttcctttagtataatctgaggcataacaataaccattttgaaagggcaatataagagtttggggtcaagttttcttgagttcctttttttgtctgaaatattcgattttattagtttactgcacaagagtaatttttggtagaaattctatgtgtcatagatttttgtaatatgtctttatcatccacaaatagctagaatagtttgaggttctaaggagatgtccaggcatttcttaagttcacatttaaattccagatagaatgaggtgtttttctgctatactgtagctggaaatataggccttgctagccttcaagacatacatatgtatgagtctggggggcacattgctgtccttctatacagattttgcaaagctaaaatactttcaaagtaaaatactttaagatactttcatggtgtttctggtcacacacacaccccaaaggggtcagataagggttgggaggtgtctgcatgagagccggcagaagtctggtccccggggttcaaagaaatttctgttccaaccttgcaacaaccctctcatgatctaataatgctcattttactgcgtcttccatgtaagatcagtgatgcttgcaggagaaaaatgaaatccttttgaaatagccctaaaacatatcaatctaaaaatactagcttgtgtctgctctcacattttgggggcagtttggtagctcagcactcttgaaaagcactgggctttccagcgaactgtaacttggtcttgaaattgggattcgagcatcctttgcaaagacttaaggtttttccgtggctcccttcaaaggcacccacatcggctttgcacacgtagtgacgcgttctctgttagtcttagtttgtctttttggtccattgctgctctcttcctctgctttgagaacaaattaagcttctcttctggagcctggttcttctcaactattttcccactggctccccctgctgccgtatgggtgccagcgcatagcacaggctagcacttgctgttgacttcagataacggttttcttccggccaggaggtttgcaggaaggaagatgggttgttcacagctgtagctgaaacttaagatattccagccctgccccacaaaagtataagggaactcagaaggaccgaaatcccattatgaaggaagctaagttagttgcaagagacattttaagtagtgacaattaaaatagttttagctgttaaaacataaaaaagaggattcttaagagttcatatatatacatatatatgcctcaataaatatataaattttaagagaaaagctcttgtatagccatagaagctgggaacttggcttcttgatattttgagtttggtgtcttatgtttccaacttcttaataaaggtagatttgggaaagcttttttttttgtttgtttgctttttttgttcttttttttttgtctctagagcctcacataaaagataaaaacataaaatatagtaccacagctagaaaaaaattctctctttgcttataagtagtaatagaaaaacaaaacaaaacacttgcttaaaatgctttaagttttgcacacatctgtgtgtgtgtgtgagtgtgtgagtatgtgcatctctctggtctggaaacattgctataaggattttcacttcattgacatgtaaggtctttgtttataatgtagcaagacatgagagactacagggaaaaaagccaacagtgtcattggttccgttcctgtgtcagctttctgtgttggctcgcataaactgacccctcaccccttgcttctatgtttcattaaataaatcaattactaagagaatgctttcagctatcatcagtcaatcaatttgatttataggaaaatggtagcttctatggtagagtatgaactatcccgcccttttttaaaaacaatcaaaatgttaaggcttagttggataaaagagtgagtgtccttagcatgattcaagcttccctccttccccacaaccaaggccaggagacgatgctttgaagggatgtcaggaataggaaaacagtttcttcactccaacagttgggtgatggacctagagactttcttaaagggcagacacatccgtgatattcactaggatattagttaaattggacacagcagctaatgtaatagtgggtttatgatcttgtcccgtggaaaataccaaatgtttttttcttttgttattgttcagtattcttggcttttggaaatatttttgctgaactttctatgtaaggcagatgagtggcgtttacttgctggcctggcccggcgcacgcactattagtgcttacagcagctctgcagagtggaaagaacatagatgtttgtcgtcaggggaacttggtttcagattccagctctgcctgtttgctccctaataatttgggcagcaagccttgccttcccaaagctcagtgtcttcatttgtaaacacagcagtgagaagggcaatccgattgggatgctgggctagggaactaggacactcggtagagtgagtgcctgccgagtattcatgaagcccctgggttcaaccccttgcacagcataaacagggctgcagggtacatgcctgtaatcctagcacttgggaagaggaccgaaggagcagtagttcaaggtcactcaccacttcatagataagtcaagcctagcctgtaatatggaggcactggggaaggggtatagggagagaagggataatattgagaaaggggaggaagagggaagaagagaggaaaggaaggagagagagagcatatgctacaatgcacacaaagtccagcatgatgcagagagtaccttgagcactccatatgttatatgtatccataggaaaaactgagcttaggagaacccagcattgtattccttgtaggaacataagactgtattatttctgttcccttcaaaagtgtagtctatgttagtgctgttccaactttgtgattcccatgcgatttgatgtgtggcgttatatgttaagttttggttcaaagcaatttcaaaaagtgccccctggaatgcttgacattaagtggtgacagctgtatttctctcatctgtattacaattggcaggtgacaaagcgagaagacttgcacccgaggtcctcacattttgctcacctcaaacggatgctgggtcttgtcatctaacagcaataagagaatgttgcagttctgttgcaattgagcatgttgggtttaaactaggattttctttctctgctaccaatgagatttctcccctagaggagaatacgatacacttctgcaagacagttttccactctgggatccccctgcctcgtctgggaaccccagtggcccctggggttgtctggctggattcaccctctgccttttgctagcataaattggacctcattacttttgtgcgtctgctttgctatagatgccaggatgacttcatgaatttttgtaggcagagtcaggaacatagttggtcctgaacgtgtcccatcattttttttcccattcctaaaagagtttttctttgagggtggtacattaggtaggggtctgctgccgtcctgatccttccgatgtgtgtcttccagagggctggcgataactgctcctaacccagtggaattattgtaatggctccttttctcttgtctcctcccatgacctttacaaagccaggatcttgtttttccatttgctttccgggagttcacaccttttgcttctttccataattttacaaatagatcctttaaaaaaatctaacatggagttttcattgttgtttgtttgctgttgttgtttaaatgccttaaactctgagctttttctggcaaaaaatgcataaagcagtagcagagattagcctatccagtttcccctagaaataaaggcatctctccttccaacgacactggaagtacccaggcacaccacttcttgttactatttaatgctcaaaaaagcacgttcagaacacagcccaccattccactttataatatcttaatcaatcgagtatggcacaaatattcccttgcctcgtcagaagagaggagtgccaagcacccgtaccccttatcatgggcacacttagcacttaaactttgatttgtgatatcgcatatagtaggggattgggatcgcttagagagatagttgcttctatattcaggcagggaatatacaagaagagcctggagcgtcttacagtgccagataggaaggacgtgatcacacacacagaactcccccgatgaggacataccagcctgatgcaagagtacaccgaaagaacaccccgtggcctgagctggaacaatttgagcaagaaaatgtgagattaggttatgacccaaattataaaacaaatacacataacccattctggaaacaataacaacaacaacaacaacaaaacaaaaaccccagctgagcaaatgatatggggcatagacaaacttgtgggcaggaacactccctccgagtcactgttgtacgttctccccatgagaagggagaactccactccctagccccaaaatatggagactgaacaacaatttccttccacatagcgtagtatgaactgggtgggtgggggatggggggacttgaccctgcagtgaatactgacgagccctgccttggccaggttgtcaagtcccccannnnnnnnnnnnnnnnnnnnccatattgaccatatatccttgatatgatctgataaaaatggctctttgcatctgttagcctcatactgggaacatggccccagtctaatcgcaggaatatgtttatcagacaaattgaagtttgcaacattttacagaataccaggtcagcattcctcagaactttttaaggttaattaccaccaatgaggaaaacgtaggaaactctctcaagcgagaagagctgtggcctggtactgtgacatgttgtcctaggtgggcccctgggacagaaaacagacatgtcctaggggcaaagggaccccgagtcgtcagtgtgtgttagattactgcagcaattataattgcaaccagtgtgaagtgtcagagacaggagaaatcgagtgtggagcagacaggacttttaacttgtctgtgcacgattcctgtgagtaaacatgttctaaaacaaagtggtttaaaacctccagcctcctaggcacatctgaatgctgcctcctctatcaagcctgttttactccaattccctccagacctccctcctcagcctccagctttcctaattgcctgtgaggcttttctttctttgaccttgcaaagacctttctgtgtgattttcccaacctcttaacatgacttgctgctgttttattctggcgacaaggcttcccatagttcatttatccaacacgcagcatccatgtgcccctgtgtaggtgttcacgtaaagtgagacctagcaagaggcattggatactgcaaatgtcatttttcacttccgattggaaagtcgagctctagaatgcctgcttttcctttcattagtagaaccctgagcgattctcactaggaatctcactataacataacgcaatgttacatattctaaattagtcttaagttggttcaattaagcattttatcatgcatcggcaaaaccgtgcaggtcatggaagcggcttccctgtgtttccttgcgtgactatttgattattagcattctccttatcagcttattattccaactgaaaggggtttgttgggaagttttcccccactagcttgtgaaaacatgatatgtgttttggacgtgtctgttggatggaattctgggaagttttgcccagcacgtgtgctttagctcccattagcatctctggcctgcagcacagccagccctatggtgacagcccctagctcttattgctggcaacagtgtgctgtgcagatagatgtaggcacactaataggaaggactttggcctgtcataaacaggtctagggtatggagaacacagctgtgatggggatgtatccatagcaaccagtctaagatgtaactgccatattggaatacattcacaccaatggatgtggccctctgccacccttcaggaagctgactctcaaggctactgtgcctgttcacagcagcgctcttgttgcactgtttcggtcttaaaggggaataaagacatcgtaaagaagtatgcttcaaattgttcagaggggtgcctattaaagtggacttcttgccttaattttctttttaattttatctgatcattctgatccaaactgactacagaacaacagacatttcccccacagtggtaaagctgcagaggaaaaaaaatatttgatcatacaaaaatgattatttttaaggaattatatatactgaattatacatattttttaaagctcacttcttagtaattactgaatacctttatgccagctccagtgcttagaaaacaaatacgttctttgtccaggatgcttctattttatattggctaggtttgtcttgttttgtttttaaattttaggggagaaaatgaaccatataaccgtagtgaaatttgtagcaaaaaaaatttaacaaaattactttccaatttagagatgctttctgtttttaataaaaagtattcatataagtatttgccgaggcatttacatcactctgttatgtatgagaaaaactcatttcacaagaggctaagctataattctgttgaacaagtattttaaaaattaagacaaatttggagtgtattcctttctttggctgagggttaagcttcatgagccatagttttttatttttatatttttaatatttcaaatcgacttcaaaaattaagttgtgatcaaatgaggaggattaccatcatctttgctgtcaactgttgactttctgttctctggcttcatacttgatgttctcggtgtagtccccttagttctgcacagtgtaagtagagatgagttttgagacgtcataaagaagcctctagaaatagacttatttctcattacacgtcaagagaagattggtttatctgggagttgttggacccagagctgagtttttccatgtgttgttagtggttgaagggcacagagggggacagtcaaaaagtccatgagttcagagagctgcagtgctgttctctacgggaagagtcagatccagtgggcaaaaaacttcccgctctttggtcttcctggcacgtctttttacactgtcctttcagcacatatgacttccgccatagctagttagaaaagtcccgcacagttatgtaatgggaaccacttttgtgtgtttgctcacacacctccagctgggatatctggtgtcgtcctggagccaatgcactgtgtgttagaaacttttctaccacaatccacagatggatagagggagagccatacgtgttctcagactacactctgaaagtatgcacagacatttaatgaccgtttaaagtgacatcagcaacgtgttaattcccagaaggggatcccctacttaccaaaggatggtacatcgtgagcctaggacatcttgttctgctcccttcttgtctaagtcgtgtcggatgggaacggaactacctcgagctctagctctttgcaagagttggacttaaggcagcccgatctttatgggagggcctcgggtaggaccgtgtagcgaaagcttgaggcgcaagttggctgagaatttaggaataacatgggataaaacctggctgatggtggagtttgtggcagcagacagttcaggaaaggtgtaagcagccttaggattttaaaattagccctactataagttggcttggagctgggttttgggtttttggttttttggttttttctagttgggacaaaaggaaataaggctctggattcctgagttggggtaatagatgaaaactgcagaaaagtagggtagagagcttatctatggagtgtcactgaggagtagttccagctgacctggggtcaagactctggctggaggcaaaactgatcaggtggtgtccctgcccccctttctcactccagccttggggctcctgtggtgaaatgcagttgtcatgagagattgggacagcctggaaggaaaaaagaaatcccagacaggtcagccaaagggtgcaaagatctaaggaaggacagtcagctatgggtgtgggaggaggggtgggactgacaggagagtgaaatttatggccacgggtgtatttcacgaggctcagcctctttagcactccaagctggtgtcacctccttcacctgtgacctccttgagtcctagcccagtagcagcatgggtagtttatgcaatccagccgctgggccacccccctgaggaacgcgttgtttgggagtgaaggaagttgaagaggcatgggcatagtagggagcgagctgcaaaaggatggaagaaaccaggtcacaagaagtatgggtgggtcctaggaacgggggctgtcagctgctcctagatgctccagtggaatggaggggcaggtgccagtgacccttttcaccattctgatgtcccctacattctgataaaaatgtaccccacactagagatgtgaccttggataattaaattgttcctgtctctctgagcctgtcttctatgtcagttgaaacatatataacccacctcttaggacttgttaaaagcagaagcctgcacatggaggccccagggactatctttagtagggatggcactgcaactatttttaaacttaaaaggtcaactttatatgctgctgtataggtgacccattgcaaccggagctagagtcaacaggcgcgggggaagcttccagggtgcctttgaaatcctgatacccagtcgcagtgatttatggggcctcagctctctccagtatgcagtgctcactgagtttgttgactttagttttagttcggtagcctagcaccctgtgatagcatatttttatttaaactgaccagttaacactggtcacccagggcgattgtgcacgaaggcagccacaggaaagggagcccttggagagcttcactctggggttccagggttggccctttttctttttctttttctttgattttttttttccctctttcggggatgatttccaaggcactaggttctgtgcaagccactaagactgtggctaaggaagtaccaaaaaatcaacaaggatgctagctatccttcctggtagaagttgaaacgagaactaaacgtgaagcctttctttcacagacatgacatgacaatccagctgagaaaacaggagtgcaagagcgatgaccttgaatctggtgccagctcagtgatgagggtttggtcatgagtctgacactagccatggccagcgacaagaaattccctagtggtgcagttgtcataggggttgaaaaagagtcaccatttaggtaaatgatccattttctacttactgtcagccacttagcagagaaatcacacttgggcttcttagtcaaaggctgctgggtgtttgtttgtttgtttgtttgtttgtttatttttaattctaaaaatctttctccttagaggtttacctaattaatttcactgaggtagaagagtttttttttttttttttttttaaaaagaacaaaaacaaaaacaaaaaaacagccctctgttacttgtcaaggcctttatctctaagtgaatccaaactttttaatgctagacctgcccttggttttggtctttattcaagtcacctttgaatgacatttgcagtttgcgtgtctttgttacttgggatgatctgtcaccatctccccactataccacgtttgtgggtaaaaggttttagtaaggactgggtatgttctatgccttgtgactgccaacagtgagatgcagtttttagtttctcagtgagggatatttttagccttgttcttagggaccatctccaaggttcctatgtgaaaagggagttttttgtgtatgagtgcttatatgaaagcataccactaccaaacatgcagacatactatggaaaatatggctggccataggagcaagtcattgtgtgctaatgaacaatagacaacttcatctccttgtagagaagttcaaagatcattgattccacccaggggagcaggatgattggggagcgtcccagaattactacggaagttgatttgagcatctagggattatgtaggtaagaaggagtggagtggttagacagtgcagggaggaagggggcgtgcttatagactgtgctgttggttgtctgtggaggtgggaggctaacggtgtttctggaagtgaaagactggaagagagaatctagttgtagggccagaggcagacaccagacctatagattaggcagcactctgggctgccctatttgccagtctaagccacttgtcaccccgagaccctcgagggactcttacgtttgattgtaaggaaaacagcagcagtgattttagaaaagtacttaagagccagggacatcttgagtggaaagacccgaaacgagttgaatcagagagctaggcagcaaggggagaagggaacaggttagaaacgacatgaaaggaatggatgaaggcaggaagacgaaggtgtggaggaacaggaggccggcagccggagaggtgggattctcaacccagacggtgacagacggtgacatgctggtgattcagtattaggaagagaggccaacggtgggtgggggatgttggacaatctctcagtcaagtctgtctgtgggaaatcgcagtgaggtgtatgaccacatagaattaccctgcacaccttccgtaatcagcactaagaatgagaaaacaaatggtcggaatgcagagatggctcaggctcaagaacactttcacttcttccagaggaccagaatgcagggcccagcacctgtgttatgtctctcacagacacctgtaaccacagcttcaaaggacccaaggaccgacctctcaggagccagctcacttacattaatggacatgcacgcgggccataaacacaaatacgtataacaaaaataagacgaatagggagccccactcgttgttgatggaagtgcaagctggcaaccatataggaatggagattccgcacaaagctagaaatagatcagtcggctgacctagctctccccctggacgtatacccaaagaactccgaatgctactgccgagatacttgctcacgtatgttgactgcactctccacagcagtgaggagaaatgccgttcatatatacacagttttagtttcatgaggcttccctgtgagttttagaaggcagtttcgtgaatgatcagaaccgataattctgtatgccacctgcttgctttatttccttagtgtccccaaatagaagtttacatggccctgatttgcgtgagtactcccctgagctgccagaggaaagtgacagccacggctgttattgtccctgttcagccactgatcactgttcataatgcttgcagtgtttttggcgtaaatggatgggggtcagtgctcccttctgttgcaacatttataagatgcgtccctgagctatgttctttaaaaaaaacaaaacaaacaaacaaaaaaacccaaaaaaccaaaaacaaccctatgtcaagaaagagctccaattaaacaatgctgttagtgttgtattcgttatactaattaatacacatttagtcaagtggagtgaacttccagagtcattgttcaggagagttagtctactgctctagctgtcttcagacacagcagaagagggccttggattccattgcagacggttgtgagccagcatgtggttgctgggaatcgagctcaggacctctggaagagcagacagtgctcttaaccgccgagccatctctgcagcccctgcataccattcttagtctgattgtctcctgtgtgatggagatagtcctgctgctgataaagcttacccgttgaactctggttggctgctgcttcatgagctgtgctgaattacccacatcacatgggctctcacgttcctcctcacagtgtcgaaagcccttaaatgacacactgcaatcatctgagggcctcgaaaggagtctgcactcaacacctttgtgtacttcacagttctcagtcagggtagcaaactaggaaaacactgttattaaactgtgtcctctgtggctgttgagctctcccagctgatcttattgtttttgagataatgtctcactttgtaaccaaggctgatctgcaactatgtatcccaggctggccacagactcctaacagttccggcattactatattgaatgctggaggaattctagccttgagtcaccaccatgcctcacttccattattatactactttaaatggctcagcagttaagagcactgactgctcttccagaggttctgagttcaattcccagcaatcacatggtggctcacaaccatctgtaatgggatccgatgtcctcttctggtttgtctgaagacagctacagtgtactcatatacatacaataaataaataattcttttaaaaatgtattattatttagtcttcattcttgaaagacttaaattgcacacaacttaatgaacatactgctcttggtggacactagattctacctttagttattttttgtgtgaccttgagtgagtcagcctttcagagtcctaatcccccgtgacgtgaggtgggattttaaaccaacacattgtctatacaagccctctctacgggactactctaaagacaccaagaaaagttttaaagcgatgaatctgctttaatgtggtgcctttggagtatctgaaggtggctttttcagaattccctggcagccttcctagtccagaacgctagaaggatgtgggggtaggggaggggggaggggtggaagatcctggaatgcttaaaaagcacatggaagtctttgcacacttacatattgctactggaggggaggttagcttgcccttattcttcctgcaaagcctcccaccaggacccctccatctccatctccannnnnnnnnnnnnnnnnnnnaccaggacccctccatctccatctccatctccatctccatctccatctccatctccatctccatctccatctccatctccatctccatctccatctccatctcggggctagcagcattcaaacctacctaagtctgcaccgtaggtcctttctttaaccccagggttcaccttgtaaagttctggctactctctctgtcccagagcttcttttcttcccctgtctgaagaggttacagatgtaaaccatgccgggtttaaattataaaccatctcctcggagccttccaggatgcctctgtgtcctccctcgtggcctcattctgcatggtggattctgcctcaagtcttctttagttattaaaattggacactgtgtttaattgatacataaaaccaaaaaaaaaactgtacgtactaataggataccatcatgtgatattacaaaacatgcctacttaatgaaacccttaaatcaagtgaaatacacctcttttgcacttccttgtggtgaaaacacgtcttgtcttctaggtttctgaaatacatggcatactctgtagggtacaccagaactcctgctgctgtccatcagccaatcttccctgatcttccacccccctctctttctccagcctttgcatgacccgcattgatgtcttcccagttgatagacaggttgtgcacacacttcttgaacagcactgcaattgtctctttctaggtcgttgcgtcccgtctcagttctcaacctggggagctttcctgactttaatgtttggcctcttctcatttgtttatttgtttgtttacttgtttacttacttggtctgccgctttattgcttctccgctcctaggtagctactgaacagtcatctgtggagatagtaagtgaatgtctattaaaaattacttgtatctagtgcggggagtctgttacttttggaggagtgctctatgaaacttcagtgctgtgggctgttgctacttgctggtcataagaagggttcagtagtaaagttagtttgggaaatgttaaataaaaggtaaatataaaccaggttacatagtatagctcttataccatacatagtacatctttcgactatgttaatgtatataaccttcataaatgcttcgctttgtgtctaaaatgacaatttcacagtggacatcatctgaaggtgttttacaagatagatgttctttacattgcattctgggaaattctgccttagacccaaacccgtcttacgagaggggaatgttcatgtgctaaaaatgggaggcagattctccccgactagaaagagaacagaccggtgagtagggacaaaacttcccaagagtggccagactcggaaagcacacggcttctgagaatggttgggtttggccagcagatctagaacatggactagagtcagcacccagtgagcatcgtctgtcttttcgatgcggagcgagagcatcctcttaggcgttggtttttgctaattagttgtaacagttcggcgtttgctctgatggagtctgtagcacatcctttgcataaaatcatgccatgtgccaccggtgacaggctgacctcctccgttcacacgtagaagcaaagacgcctcccttcatgtggcctttggccagttgcattgattattcctcagtgaagccagtgtcatgctagggatagccgtgatgatggtgatttcagctaagctgacaaaatagctttggatgtacacagctgcctatatgaatccaagctgtatcaatgaatggagaacgctgtgtgaatttgtcacttctcttgctgcagtaaaacaccatgaccaaggcaaccggtagaaggaaggctttgtttgactcggtgttccattatggcagaagagacgtgttgtggctaagggcaggaaaactgagggctcctatctggaaccgcaagcaggaagcagagagaggccaggaagagttgtgtggcttttaaacctcaagcctgctcctaggatagacttccttcagcaaggccatacctctaaacaagctcagacagcccaaactccaccacccatggggaccaagtattcagaaatctgtgcctatgcgtgatattctcgtttctcattcaaaccaccacatatgttaatgtgtcttagtcaatccacttagccaagaaatgaaaatacaaacatcaacttaggttcctgttaatttggttccaggaactcctcaacagacatagtacgtacggtgtcagactctttctaaataagtgtttcgggtatttatttgctgttttaaataaagtcattttgggggaaaaaaatcaggtcatggtttagtcttggatgtttcagaggatgacttaggtcttaaaggtcagtcttaaatgtttatgatactctcaagagcagataccacttatgaaatggtacatttgatctctctgggcctctgccttgtcatgttttggtttagtctcgttccctattcaaaccctcccattttgtctgtgatgccagtctgggcctcagagctggttaagtcaaattcatgtggtttatcactagggggcgccaaatacaaatagattcagtggatctactagcggtcaggttttcttaatagagtttctcaggaaagagtttttatcatgtgaaagtaaattctaaattatataatttaaaggattgattataaacgaattctgggttgttattgacaccccctaaaactatctcaaggcacttgaaaaacaaacagaggctccctagtttgtgatagctatttgaatttagcgtctgaatttcagttatgcctcagaattctgtatggaggaattaataatcacattttcatctgtcaatataatctaagcgttaacagtatatgtaagcacctacttaatattgactttattcctggctactatacatctccctctgtgtctttcatttttatgtagaagggtataaaacgaatatgattggttatataggatcagatgttttcagtttcctgagtgctgtgtgataaactactgctgctaagacgacctccctgagtctgaggtgcagtgagagccagtcccgtgggacacgcccacacgtacgtacagcgtgtacgtacacctcccccagcccttccctgccctactgaatgctgtcccattttaagtcagccttcgactcttccatatacgatcgatcgtcctccgtcgacacacaggcagtactgcctgctgtgtgcagtgctatgaggtactttactctctgtcacttgagagtactgtgaagccacactgtctgatttcagatcccagccctgtctgtggcttcctgactgtgtgacagctattctctttacagcccaggtgtgttgttcattgattaccttttcatggccctatctcaaaaggtgtttcctatcttgtggtgtgaggtcgggggtgttggggtgtgttgcgatcaggtgttcccgggctgtgagcctctgaaaactcccctggttagtaactgaaatgtgtgcagattttcctggggctgctctctgttccctctgtccctctcctcttccacaaagtccacatgacttcctcagactctccttcatatcggcactgtggcacgttcaagcagcaaggtgaaatgtgtaaggcctcccgtgatctggatgccacagtcagagagtcatttgatcacaaaggccagctcagtgtcactgtagaatgttacagcttgctagggtatttctatgcagattaaattgctgcagtgggcaccctagaagttcggactgtatgctaaagtgaggcttcttaaacttaacccacttgtgacctgtgactgagaaatcttcacgtgaccctaaacatatgggtctataaaataaatgtattaacctaaaatttactgataataatcacaaagagctgcattgtaaaatgatttcttggtgtgcctaacaggttttccctaacttattaaagaataaaataaatctgcacgctggtggatggatctgattgtttgattttttatgcagagtcaagttgtggctgtttgatactgtaggatgcacagtcgcttcagtgtgatttggagttgatcagccgtttagttttgtaatcctcaatactaacagcaacacccctttgcataataaatacacagagtacaacgtggcagaaatgtggttaggggcaattgaaaaaaggaaatcgtgttttaatctcaatcacacaaaatgtgtcgcaaggcttaaaaagcaggaccactcaaggcagcaactcaaatagtagtttctaaatcactagcaatacaacccaaagctactcaatttgatagttaacttggccaagaatggcagaaaaatataaagtgtgtttcgtgtaattggattcactgtgtgcagagtaaaagcctggcaattaataacatataacctgatttgagccaaatttgttccagcattgctctgtggtgttacctcacagtgcagagcatgcataccgtgcagtcttagccagggtcctatgaagtcacattatatacaacccaggtgacaccagacgcctcagattcatcgtgcacttgattttgattttctattgttgtgtgttcagaaacgttgtactgttgcaaaactttgtgaccttgcattcagtctcatgtggggttctgacgcacagttgcagaagctgggtactaaaggcgttcaagttcaagttgaaatccatatcctgagtatcagcgtgcagtggggaaaaccattttcccacccaggtctcactgtgcgtggaagtgggggataggggcgttgacaccgaagctgctctccgcctctgtgatgattcggattaacgtgttgagagtggagacaggaaggaacagaccagattaaatggtatcttacagaagacaggactggtcacaatgtttcgaagaagaggagtaggctggtggaagggaacaccctagggttactcaaggattcgcttggatgatttatgttaaacacctgatagcttgtgactcacacgagatacccactgaatggacagaaagagtcacagatttcatctgaggcactggaagaaacacgggcccagtgactgcagttggagtagttatacggactactttaaatagaaaaacggttcacggttttgaagaagttccaggtgacgttagggcaggacatttgaaatgggagagtatggtgagtttggaaacgtggtaccgaagttcaggcgagaagtcgtcatgaagaagcgtaggcccgaagcagcagcccgtggccagccagagtggaagccttaacagaaggcaaagaaaggcatggccagagaaacccgcagaaacaggcctggggagggagtgcaaagtgtcttcaaataaggcaggatatgtcaaaggtaagaaaaatggaggacagaggagaggcgaggggtgttctgctgggttattctggtggagaagtggggttgggggttagaggaatgtaggaaatgaacccaaaggtgtgatgagtgtctgagaaccccagcagcaaaagacctgatagtaatatcagaggcagagaaggcctttcccaccctcacccttgggatgtgttttaccaccctcacccttggggtgtgtttcaggctctccctctctcccgggccccctgctgccgaagtggatagtacagaaccctatataggctgtatgttttttcttagttatgtgaaactgtaactattttgtaaaaaaaaaaaaaagataaaaaatacactagaatattagcaacagtctgctatcatcagtgttattaaaaccttgagaatatttctggggtcttccatttagcattttcagcacggagttggctgaaagtacctggaattatggaaaaggacattgcaggactgctgtgctagacaggtgttagggtgaaaaatactgaggcaggcctggggcagggtgggcgccatagagtaaccaggaggcagagatgatgtagggtgctgtagagtaaccacggcagggagtcctagaaggacagagtgacaagaatatagaccttatgcagaactttgcaatagactaagagcaatgaatttctcttgtttctcacccacaagatctcttaggataaaagttacacagaataataccatgtcgagcagaatagaaaaggttggctttcccacaagaatgtccagtacattttagccctcaggataacaaggtaggcttgctctcagtttcagctctgcatgcctaaaagctattcagttctttctcggcttcatctgggatgataaaaatgttcttctgatcagaatatagaaactggaatctgtatgcataactgcattctatatccagacagagccatgaactttcagatactcccgccctccttcagtcagatttatattttagactttgttaagttttagagtgtgacggtattaaaatagaaacaaaggattttgaccgcagccttccccaaggagaagggatgcattctcggttgtgaagtctggaccagtggcatttcattatgattgtgcctgtgtgttgggcaggggagggagcaaagctgcctttatcaccaggaaagccacgtgtttgggatttgagagagactgtgcgcattgagatggtatcagaatccacacagactggcaatgcttatttaagaaacgtctacagatcttgatggttttgtggtcgttatccgtccctgtgagggggaagccccattcatctcacaggctgcagggagacctttattaaatggcgttcaccatgtgggaaggaaagcctcttttccttcagaggctcacctcgccaaccaatcacgaagcatactgagcctcaaccgtaccccctgccctcctagagcagagatggaatgtgattggtgcatagttggttctgtgggcggggtttcatgtcactcttcccggcttcccccgcagttccttatttggtagcctttgacagaactagtctttctcacagctaagcatcttgatatacattattcattaagccctggagctcgggagagaaagatgcagacccttagctctttagctgctcctccatcacatggatattccttatgcagaatagctgctgaattccgttccattttggagttttacaaatggcatgtgtttaatgagaagacgactggatgggatcataatacgatgctttcttatttatacttaattaccaaaaatatttaaattcccacaccctgaatggctttgtggaaattggtagaagtcacggtttgaagagaagcacattttagaacttgctggcacatacacatatagacacataatctatcaaaaatgcctgaagcaaactatttattgtcagtgtcttggggctacataaaggtaagatttattttgccgataaaaactgtctactttcattgaacaagtggtggattttaactaattataacggtgtctgagcaatttatttcttctcttagatatgaactgggaaagaagtgtgttttgttgctgaagataagattgtataactgagtgtcaggtgtattttgtgtattaagaaaggttttgcatgtgcattggtccttctgtttgtcctctataaatttaagttatgttctaaatagcaaggcagtgaaataacttaattgcaaataaattattctaccaaattccttactgtgactgatgaattctgattagcatgctgcatttaaatattatcagatgatgtgtgggttctaactctttgagggctagttttgacttcacgtggaaagtggaaaataatgttttgttttcccaccttcgtctttaaagctgtagatgatgtatttgtttgaatgcttttcattatagtgtaaattgattaatctggagataactgtaagaaagtttcttcacaccagggcttgattttaatctcagggagttggtaaggtgatgaggatgatgatgatgctgatgaggtgatgaggatgctgagcctgcttttcacctgccctgctgtaaagctgtcattgagttctgcctccatgattgaagcaggaaggagaaaacccctggctcactccccaaggaagcatcatttcagcctgggatgtatgagccaatcacagctcatctcttcaaagatatctgtctattccgctgtgctaagtactttcagagtgaaggctctgtctgttggttttccatttcttgggggagcaaactttcatgattgctgtcgaggttgactagaattctaagaaagctagagagatcttatctctgtcttgcttgctaggatttcttctttctctctaaatctctaggatagtccagatttttttttaatgcatctcatgtttttattgctagccatttcttgttttaaaattgcagtaaaaagcaatactagaaatactcatactctcccccagactccctctcttagccattccagccccttgaggcattttaatgacttttgttagtattatgactatgaacaatgcctatacacatctaaatatagacttttaaggcttaccttgtaggaaaatgcttgctgggctgcttagtgcctgtgttaactaacacgctgcccctaaccttttaagggagtcaaatattgatatttggtcttatgtgttctgaaagattcatttttatagagccaatgcagtactcatttaaacaggtcttaatattgatatctctcatacctgcaaggcatcatatccaaatgattgttagaatttcatgctgcagacagtagccaatgcagtatgcatttaaataggtctcaatatttcccacaccggcagggtactatatccaaataattgttagcagaattccgggatggaaactgtagtcattgtcttactgctggatgcattgcatcttttcatgcacacaggacatgtcatgtacccatcagggtcagtcgcattacacaattatagaggattaaatttgtaaaggcttcctttgttttatgacttattttgcatccttgaccatcttaaaagtccataaagagaagaattggaattctaaaacacagaatacaacactcagacctctgcaattagactttgctttatgatttaaatgctgcacacacacacacacacacacacacacacacacacactggtgcataatgagaacaaagatctcaaacacatccacggagcaatctcttcctctttcttccctcctagttgtaaccacgattcgctgtaatggttttaaaccatttagagtagaacagagccagtaagaaattcatcaacataaaatacagataactttcaaacatcgctacatacccgattcaatagaatttcacagagctttcattaagaggcacttttgcatcacccatcctaaatcaactgggggtgcaatggtgttgcaagggacattctgttagtttcttttttttttttaaagccatccttccttacccatggaaatagtctataaatagcttaataaacacagttattcaaaatgacagaaattaaccttgtaattaaaatgtttgttaaaagcattaatatatcattctttaatcaggcaactccaagttgaaaaagcactcctggccacttttgtggttattaatttagcacacggggattgaaactgttattagcagtagccaaaagaaaaaaaaagtaacaattttaactcttcaaaaatgtctttgtgctgtaacttagttggctctttgaacatggccttttgggaaatcccccccacccccagcccccaccccctacctccctttagctctcctgggatggatactttagggagttgctttaaatattgtctcatatatatattttaaaatgtaacgttgccttctttggaacacagcaggccttggtagggaggcaggcgtgtgatgtagggcttctccaacccatgcttctatgttgtagacaaagaggagagaggagtgtgggactaggctatgatacagcacgattcaggggagtcagcacaggagaatctcttcagtggcctttttaaccttggttattttattgcactaactgacgattttgatgaattatataaacaaattctcagaatgattgtacatcagctacctcattcttgcagcaaacctaaatcatttgcatgacaagtctgcagatatctgcaggtagcatgaacatgagaatgtcgcagctgccatgtccagcaacgtagtcatcctaccagtctacgtgtaaggtagacgatgggtctgtggattcctgtctcgtttgcccagtggtcttcaggaaatgagcatcttggtgcttcactgtactgagagatgttcagtgtggctggcacgtcctgtactgtctgctgagaggctcgcactagccgaaagcagtgcccacccctccccactttgacatggtcaggtagtccttaatggcaacttcatcttaagagcatgggctacttgaaatcaaagagaaaatacattgctggctacatgtttaaaatattcagacaaccttcttttgaatatattttacctaatgtgtacattttcccaagggtaaattatttataaagcacttttttacatgtgagagattatacataatattggctttgagacaatgtttaaaatggttttgagacagatgtgatttcccatatgggcccttacctaaattcctttatgtagatggataaaacggggattagctgtagatgtatgtgtaatcagatacatctttgtgtcctttattgagagacatcagtttatcagtattaaaggctcagaaatcagggttgaccaccatagaagagctaacaaaaagaactcgaataactgagtgtgtgttctgtggtaggcaaaatagaagacagcttcaatgggttagctcaattaattaactgtaaactgacaatttccttaagaaaacataattggtaaataacacaaaattttgaacactagttagtgtaaatgccttttgaaataatctcaggaagtctcgtcttagtttcacaggtagtaatatattctgctctgagtgcaaacaggacctgatgccttgtggtgtgtgatgtggtacacacacttatataaaggcctcggagcaaatacaaccgattgcctgtggtaattatttctgagcagtggggatttaaaggtttttctaaatcttcccaaatgtctaggtttctagattatttttaaccatatatgtgtgtgctgtgcttagcaagaatgtgtacaaatacatagggcaagaagagcacattttatgtttccacatttgagaatatactcgcacctgcagccgacacacagacttgtgctcaccatggcctccatggccagttcttcctacctttaggagaaacggagcgtgtattccttgtgtctcactgttggctggcattatctggatcgcactctgtctgtggtgagggttgaaggcttggtcttgatttggagtccaaatagcactggctttggaagagatttgccaagtctatgggccgcctctgtacaaatgatgtaaagaaagcaagaattgtgaaaattctaaataaaccagttcaggtctaaagcttgcatttcatacacttccaaaagacgagctcattccttttctctgggctgacaagagaaatctgagagtgaaatgtaaagtttcagtctctaccaaacatataataaaattgtttttgtttttttacatttttgatcatttatttaatattggttaccttgtatattggaaaactgcattattctgaatgtccttgtttgctttctattgctgtgataaaacaccatgacaaaaaaccaacttgcaaagggaaaggcttagttcactttacatttccaggtcaccagagcaggcacctggaggcaggcactgaagcagagaccatggaggagtgctgtttattggcttgctctccatggcttgcttggtttgctttcttatagaacccaggaccacctacccaggaacagttggcactgtccctagtgagctggaccctctcatatcaatctttatgagaagcttcacagacttacctagaggcaaactgatggaggggctctctctgtctctctttctctgtgtgtctctctccctctgtgtgtgtgtctttctgtctttgtctttctctgtctctgtccaccctgtcccctcctctctcagtgtgcatgagtgttgacacaagcatgtgtgtctgtgtaccacatatatgcctgatggccacagagacgagagtgctggatcccttggaactggagttgcaaacagttattagccactgtgtgggtgctgataatcgagcctaggtcctctggaaagcaaccagtgcttccagccactgggtcatctctccagccctggaggaattttctcaattgagcttcctcttcccagattaactccagattgtgtcaaattgacagaacaacagtaaaaaccgacagacaaaaccaggacactgaatactgaaaactgctgaagcattttaacatgccaggttgggagagttttttagactcaaaggtaggctttacattaagaaacgctatccatatggtcccttacgaattctctggcctctgagtgttccacatggaatacacatacgtaaagagtcaaagacagcatccacaagtgagagaaaatgccatgtttgctttctgggttacctgacttggagtgacctcttccaattccactcatatgcattttcacaatttcatatttttaaaagaggaataatgtcccatcatgtaaatgtgccacatcttcaccatccggtcaccccgttgatggacatgtaggttgtttccgtttcttggccgttgtggatagaaaagcattgcacacgggtgtgcaaggacctctgtagtaagacagcannnnnnnnnnnnnnnnnnnntgttcccacatggaatacacatacgtaatgagtcaaagacagcatccacaagtgagagaaaatgccatgtttgctttctgggttacctgacttggagtgacctcttccaattccactcatatgcattttcacaatttcatatttttaaaagaggaataatgtcccatcatgtaaatgtgccacatcttcaccatccagtcaccccgttgatggacatgtaggttgtttccgtttcttggccgttgtggatagaaaagcattgcacacgggtgtgcaaggacctctgtagtaagacagcatcctttggagaaatgcccgggagtgctgaatcatgtggcagatttatttgtggctttttgaggaacccccaaacgggtttccataatggcggtgccagttcacactccccctcagcagcgttcccctctccctgaatcctcaccagcgtctgtcctcttccttttagctctgccattctgagtggggaggagctgaaatctcagagccgctttaatctgcatttccctgctgccttagcagatgactgcagtgagtctgatggcataggccctgtggcctctgcagatgactgcagtgagtctgatggcataggccctgtggcctctgcagatgactgcagtgagtctgatggcataggccctgtggcctctgtagaaataaatggtgaacttgaaaagtagagaactaagcactgacctgtcttctgtttcccaacttgggagacggatctgtaaattctgtggtttctgagaactgatactccttacaatttctgcttgtatacagcatcagaaggaagtgctaggtagtgtttactcaaatgttgtatccctccaaagccccgagagaacacacaaacctattcagtttttctttagggttaaagagaattatatttttacattatattacattattactattatatactgatgtttgataatgatcaatcaagtgatataagaagacagtgttgacgccgggcatggtggcacatgcctttaatcccagcacttgggaggcagaggtaggcgaattcctgagttcaaggccagcctggtctacagagtgagttccaagacagccagggctatacagagaaaccctgtttcgaaaaaacaaacaaacaaacaaacaaaaacaaaaaaaacaaaaaaactaaagaatacagtgttaaactcagagtgtcacaggttaaaagaagacatgaaagcagaagggagatttgctgggcagaagggctccggtggggatttgggggtgaaaacgactgaagttgacgccataactatagaaacagtcaaacaccaaaagcaaaggaaagcaagcagaaatatagaatgccgggctgtagagatggctcagaggttaagagcactaactgctcttccgaaggtcctgagttcaagtcccagcaaccacatggtggctcacaaccatccataatgagatctgatgccctcttctggggtatctgaagacagccaaagtgtacttacatataataaataaataaatctttaaatatatatatatatatatatatatatatagagagagagagagagagagagagagaaaatgtcatgtgcaattgtcctgtattcatctattacatttttcttctgccgatgataatannnnnnnnnnnnnnnnnnnntggtcccttacgaattctctggcctctgagtgttccacatggaatacacatacgtaaagagtcaaagacagcatcccacaagtgagagaaaatgccatgtttgctttctgggttacctgacttggagtgacctcttccaattccactcatatgcattttcacaatttcatatttttaaaagaggaataatgtcccatcatgtaaatgtgccacatcttcaccatccggtcaccccgttgatggacatgtaggttgtttccgtttcttggccgttgtggatagaagagcattgcacacgggtgtgcaaggacctctgtagtaagacagcgtcctttggagaaacgcccgggagtgctgaatcatgtggcagatctatttgtggctttttgaggaacccccaaacgggtttccataatggcggtgccagttcacactccccctcagcagcgttcccctctccctgagtcctcaccagcgtctgtcctcttccttttagctctgccattctgagtggggaggagctgaaatctcagagccgctttaatctgcatttccctgctgccttagcagatgactgcagtgagtctgatggcataggccctgtggcctctgcagatgactgcagtgagtctgatggcataggccctgtggcctctgcagatgactgcagtgagtctgatggcataggccctgtggcctctgcagatgactgcagtgagtctgatggcataggccctgtggcctctgcagatgactgcagtgagtctgatggcataggccctgtggcctctgcagatgactgcagtgagtctgatggtataggccctgtggcctctgtagaaataaatggtgaacttgaaaagcagagaactaagcactgacctgtcttctgtttcccaacttgggagtctgatggcatatatatatatatatagagatagatagatagatagatagatagatagatagatagagagaatgtcatgtgcaattgtcctgtattcatctattacatttttcttctgccgatgataataatacctgtgttttaaaaattcttttattcattgattaatgccattaggtgctgtgacctgtggtagctaactttgcatattccaatggaagataatataaagttaaatgaaattctagactcaattcctcctccctccttccatggggttcatttcctcatgggcccagggactggccaccacacagactgttgcaactttcctacactgaagaaagtcacactgggtaatacgtggtcatgagtacttaaatgttctttgggtggatttcactgtgtgacatcagggcaagcttacgtcacacccctgccaacttcccttaacgttaagaactctgtatctttttgtctttcagttcaaaaggatgctgaaccgggagctcacgcatctctctgagatgagtcggtctggcaaccaggtgtcggagtacatctcaaacacatttctcggtgagcagagcggcatgtagcttaaggctttcccttgatttttctgcgccatggtctttacagttaacttgtcctagaacccaaacataggttagagaagctattttaaatacataatgttaataaatggagactctcagcctcagaatcaatttaaggtgacagtatgttctgtctgtttgtttacttacagggctgggtttcaagcctacagcctagcacatgctaggcaagtaccatactactgagccacctctctagccaagtcttccctaatgctaaattataaaatatttaccgagatatctattcatggctgtattgaacacttttttttttttgttaaatgccaccattactgggtacaagggaattaataataaattataaatgggccctaacccctaccatgaaggctaccatgtctggtgattacctggcctagcttgactgatggagatgcagttcctaagggaagcttgctgctgtagtcaagagtgggtgtggttttgggagacaacccttctaaccttaactgcagacagaaaatgccataactgaaagttaatcatttgaatccctcctagccatgggaatgcacctttaaaacaaaaattactgtacatgaagaagcaaattcctatagtgatgtttgttgagcctatgttgtacaaggatgagcgaaggcctttaacagaaatgagtgtacaaagacatcttatgtctatagcttttacgtaaaaattagcatatgtgcctgtcgttatatgatgttgtggtttgtctgtgggtccctgtagactcggctgcatcataagcatttccttcttattgcccaggaaacagtaacagaaggatctggccattctgaggtgtggattcaactcccacagtgcggctgatcacagttatttagcccccgagttcattcgttgctatttttgatatgtgtgcatgtgaagtttctaacgttttaaaatacatgttgaaactggagtccatatagtagaacaagttgtttccaaacttctaaatgaattcaaatggtgatagagttgtcaaacagtaaataaccaagtattttgctttctttaaattggctctcacaacttgcagttttctctcaggacaatctgtcaggaggcctctggtaattaagtagaatctgtttaattttgggtttgcagataccaacttgtagtcaactctaaaaggaaaagtagtgtttggagtcacttcttagaatatatactgagcagttacggttggtccatttatatgttgtgtgattaaaaaataaagttgaattcctagtaaatgtagggtgtctctgaatgttttaagataagcaacatgaagtggaaatcccctctccaactcagaaggaaaaggagaagaagaaaaggccgatgtcgcagatcagtggggtcaagaagttgatgcacagctccagcctaactaattcatgtatccccaggtttggggttaaaacggagcaggaagatgtcctggccaaggtgaggggattcagggatcatgacgtggtacaccttctcatgaattagttaattaattctctctctctctctctctctcttnnnnnnnnnnnnnnnnnnnncacatgcctttaatccctgtacttgggtggcagaggcaggtggtatctctgtaggtttgaggccatcttggtctacatagtgagttccaggacagccatagtgagactccagtgtagttccaggaactacatagtgagactgtgtctgtctcaaatatggataaagagatagatcaacaacaaacctattttgttttctttgaagtaactgagagaatgtgtgtgtgtgtttgtgtgtgtttgtgtgtgtgtgtgtgtgtgtgtgtgtgtgtgtgagagagagagagagagagagagagagagagagagagagagagagagagagagagaaacacaagtgtgattaggacatcagataccttgtacctggagttataaccttgtacctggagttataagaagtcctgagccatctaacattgggtgctgggaactgaacacaggtggtcaggaaaagcaataattgttcttaaccactgagccatctctctagttcttgatttgaaggtgggaaagtcatttcataaatctataaatcattaaagtttagtaatatgtagttttagacatgtggcttggttgatttgtgtttgttgctgtttggtggcttgtttcttttaagcatctccattcgagtttttgaccttggagagttagaaatttatcatctcttctggattttacactaggtagattctgtgactagatttcatctattaaattatttgaggtcaacactgaaagcctatgaatgtaatttgccatcagattcatgagtttaagcaatgctatgtttcagaatgttgacttgagcttgccttgtgtttgactgttcacatgccatttcctttacatttaaaatgagccattcttgctttatcttatgtcagcagtgtttttcataaaagttggttatttttaaatgcttcaacttattgtcacttgttgttcaacttcgtgttctccgggtgctttcctttgacctaggaactagaagatgtgaacaagtggggcctccacgttttccgaatagcagagctgtctggtaaccggcctctgactgttatcatgcacaccatttttcaggtaactggcctctctctccctgttaccatgcacaccggttttctggtgatgtcctccagttgcttctaagcagggactgtgttggtcattttctgctgctgtgacatgagccactcttttgagaagggattcatttcagctcacagtttcgggggcctgggcagcttccccattgcctttaagttgtgatgagataaaccctgagagagtagaagtggctcagctgaaatgaaccaatcgagggagagagcaagggggaggggacgttaccctggggcaggacagaatcttcaaggcctgctcctttcaactctgccttcttcatggtagcctatctagccgtgaactcactaataaggttaatgtacccatcccatggtcacacagccacctattaactgtaccacctccacagtgaggtaccggggcaggttttaccccaactgcccagcccttgcactgggcactgtaccatcccctttgacttatttggatgcctttcttttactgctcctttataaagaacgtaataataaatatggagtaagcataaaacactaatggtagcatattttctatttaagaaatatgggggaacggaaacaatgtattaacaatagttataaattcatctctacaatgccaaactcttcactttctcaacaaacgaacctgattaaccaggatataattccttgagtatcttttttagtattcagccatctttcctatacccgtttcttgcccctgtaccacgtcagggtagggctccctgagaagctggggctggggccagggctcgggcgggggggaggggggcggggctggggccggtatctggagactagatgaggaactccagccttcaaacaaacttgggttcatcagtgtgactgaggggcccagtcagcagctgcactgaagctgcctgcccaagctgaggactggcaccccactcctcacacggaacctctcagctacaatacagttgttctcagaaggccagcccagcttcgggttgttgccagagttcctgcccttcctggatacatccatttccctcagtggatataaggaaacattgtctcattttgggggttgatttgtaggtaactcaagtatatgattctcttttaacccaccctggggaatgagttttacgaaatgttaagaggatttctttccttacaggaacgagatttgttaaaaacgtttaaaatcccagtagacactttgattacgtatcttatgactctggaagaccattaccatgctgacgtggcctatcacaacaacatccatgctgcagacgtcgtccagtccactcacgtgctgctctctacacccgctttggaggtcaggctcttgtctgatgtgtcactcgattgccccttgtacttggatgttggagggttcacaggacagacagcaactaacttcagtggggatacctcgacttacttacaaggaggagaaagttattgttgataaacaacagatcctttgatgagttttatcagtgagagctgctacgagatttggggatttatctgtttatgatgtcacttctctgaaatgatccagtgggcatagcacacacacacatctcacatactgacttccggctaggttgttttctagaactttagttggacagctgtagttcaaaggtcgattattttctaaaatataagcaacatgttaatactttccaagaatttatttgaaggaaatgcccttttgaattttccaatcctaagaaattgttccaccgagtgtttaataaaggggtttgatttccataatcattttggggaaagattctgagttgttgtatagtttaaactctccattgtaaaattgtgcttgtagctcattatttggcagacccctcagccatcattctgaggtgagaacaatttctgtcctgatctcctccacctctacatccagggacatttgggggatatctggagacatttttggttgtacatgctcccagcatgttgtgagttaaggcaaagaatttgctaaacagcccagtagtgtgcatgatgtgctcaacacagccttgtcggcaccgaggctaagagctagtgacttagatgacaggaagatgagagagcaaggaatccctccagcattattgaggggtcagatgttctcacagtcggtcattaagcaagttgcccatcagcctgtatatccttgcagcatcatttcagacacacgagtattttttgagaatataacatgagttttgccatgatgtataataaagtcagatgaaatgctttgctttcaaatcacatttaagaaacgcatccccaagcccctatttgatgaagcatattaaggttctgccagactttaccctgttccttctgacccctgggcttggtggttattgcattggtttatatagcactttgctcaggcagctctggaataacatagtaatactacctgcactcttggcttcccaggctgtgttcacagacttggagattctcgcggccatttttgccagtgcaatacatgatgtggaccatcctggggtgtcaaatcaatttctgatcaatacaagtaagtgaagcctgggtgtgttttggtttgtttgtttgtttgtttgttgttacattaaaaaaaataactgggtggtttttataagtccatgtttttccagtatcataacgtgcttttgacatacataaatatgttttggcaatagtatgacaccaatgtaattcgtctctgcaaatgatcacggccttccgagaggagggcagttggtgtgcaaaaatcatcagggtgctgtagcacctctctaaaaatcgtctcttactgtgtttctgcgaaaggcaatcacggggggttgcatgtacagtggtgtaggcctcctgtaggaaccagtactaaggctcttcaccctgtggatcgtccctggtcccagacatcagagctctccttcctccttccatcgcaactcggcccccaatcagttccttttgtagatcgccaatgaaagtagcaggaccatagtttctaggctcatctttaacaactcagtttccttatcccccagtgacctctcagtgcctaagaagataccactgtgtctaggattgtaagggatggtagagatctggttgtatcgctgatccaccgcaagctaagagtgtggaggagactcgtctcttcctctggagaaaggtttagcatgagataaacgctacttggtacttgatgcggctaggtaaatgacttagaagtaccatgacataatcctttcctgtcgtgctgtggtagattgatattataagtttccctttagggaagagacatgtcaacttgtgactgtttgccacattaagaaagtacctttcttctgcttcggtctgtgggttacattttgcccttgtgctgtagtaatctggctatcctacttatatcacaacttatattcaatcattactgtagcaagagttaaagagagaaggccaatgtgacgactgtgtctcaagaggcttctttcaggtctgtgagattgtttagagacactcatttctttcaatagcctctgtagaaacaacaaaatctgttggtgatccacaaatggcgcaaagagggggtcagaggactcaagcgcctcctgcgccttggggttggtagagcacatttcagatattaatggtaggaagggccttactaatcagacagaatcacatttcatgtgcccactgctgtatgagaacctgtaacagggcacatcaaaaacacctgcataaaactattaccacgctggaatctctgcctgggcttgcactgggctgggtgttcaggatagacggagcactttctccaaacggctggcaggtcacatggtgcagtgttacacttgaactttccgtaagtctggcctattcagtagtctgaggcctgtgcatgtcttggtatgtccttaatgatatagatgtcaacagaatgtcttgtttagatttaatttttgacatttaagagagtcctatttttctttaagttataacatcaaacactggaggggtatttcctttgcattcgatcatatatgctagtgtatgttacttataatggcatcagagtgaagaacagcaaacacacttaactaactcatagtagattcataatagcatcaccgtctttaagtattctactatagattttaggataacgtggacaagttctcttctttctgtgaaccccccaaacacagctgggccttggctggcacctgtgggactctggtgggcaacagagcatctgtggagtttgctatctcagctagcacacacacacacacacacacacacacacacacacacacacacaccatccctttaaagattgaaagacaaccagaaaatggagagatttggggaatgcttataaatttagagaagtggtcaaaggtgtctatttcgtttcatttttctggtgacacacctaggcagaaacctgtttttagcactgtaatggtgggtgagactacagctacacagggaagaccttagttagctcaaggatcagctcttgttgtccattcagatgatagagtggagtgaggaagtgtcattcctcagccagtgaggtacacagatgtcccagggctgaccagaatcactgccttagctttgagagatcactggcgcctgcagtctcccctgccccccccccccacacctgccttttccttcttcctcttcagtagtgcaaatggtttatattcatagcatgtaacaattgaatccctggagactttaaacataacaaatctaagacttttatgaaataatttgtcaaacttacgtgtctattttcgtttgtagtaacccttcagagagagacttgagtttgaattttctttggctttcacagatggattcggtgctaatgagtcagatttccacactctcaagcccttgactcaaggctggtccttccaacttccaaagccaaaggttgaacctggctttcataacaaaagaatcttgagttttgatcnnnnnnnnnnnnnnnnnnnnnnnnnnnnnnnnncaaaccgctagagagatggctacctctcttgaagaggcatagtgagctttaaagacatgtcccagggcacgctgtccacaagatttccagtgcattcatgctcctgcctcttagctgtgatctcattcttcagtgatttcttagtttggggggactgaatggtttcataccgtggtgtttttcgctactgaaagcacccataggttcccaaagcagggtggttctttctacctggcggagctgatgatgtttgcttcatcactgttatgagactgtttgagactcagtgtacaatgagaagtttagttttaacgaaggccttggtaacagagaggtctgcaaacaccagtcttggagaaattgaaatcccaggtagagaagttgccttggccgttttaaagacaacactgataaatcaacccgtagagtataaatagcttcataaaggtttgactgcagcatactaaaaggcatttatcatgaaaagatcacttgatttttcccgttttattttctgaaaaagtgaaaccgtgtgaaaggtatgaacatgtatggtgttatatttcgcttggaaagaaagtgttttgtttacagtaaagatggccaagtttagggagaaggatttagtcgctctcgtcttgtattcaaagcttctatctctgggtttccaagagtggagaggcagtacatcacagtaagttgaggtgggatctagctaccagcacactcactttacagaaattatcagtctctcatatcacttggacatatattttccatagctatactagtgggttatataatagacacctttcttctttgtttaaacctttgaaataaggacacgtttattttttaactaatgtgactatgtagagaacaagggcaaaatattggcttgcaatagcttgtgttatgttggcagaaacaagtgcgtatgtggctggagatgttactccagacagtggaagaaatcggaaagtatcagggtacataatgtgagtggagagatgggaagaagggcagtttaggaacgttttgtttagaagtctttttctttaattgtataaaacattgacaattgaactttcacgggtgacattttcatacatgtgtgtaaaatattttgatgttatattatgatgttatcatacatgtacataatacaccttaatataaccccagcaacacaatcccttgcctgtccttcgtagtcctggttctttcagaagtcctcacacagatgagtatttatgcctccagtgacttagtgacatggcagaacatgtcattttcaaccccttcacgtatagttcataatcatccattataataaagatatgtgtgtcagtgtgtgtgtgtcagtgtgtgtgtgtcagtgtgtgtgtgtatgtatgtaagttaactcttttccatatttgcctagagaagtctgatgaatttaaaatttgacccatgctcctcttaatatagactacatctttcatcacattaatttttaaaaatacatccatccagttgatctcagggctggatggtgtatgctagcttggtggccacgcctttaatcccagtgcataacctctgtgagttcagtgccagccagggctacacagtgggctcttgtggatgatgatcataataatatgttcattgaaaagggaaaaagacacagtgtgagaaaccatgaagggaattcctgcctgtgatgagttttactgatctttcaaacttctctctaggcacatgtataagcatagaactttggacataaaactcataatacaggtgattgcctgtactctattgtcttctcagagacctagtctagacctgtttcctgaaagaaaataaatcaacttaagtcctgctagtagacactaagttacccattttcttctgtgtacatcactttgaatatgtataatcttagactaaaacttattttacatttgtatacatattattttatttaatccaacagaaagcttaaactttaataattttaagttcatcattagaatttttttctaaagctcttttttttttttagggcatcacatttcttaatttttgttgcataagttggtaattagtactgtaagatagagttcattcaagtctacctatactgccgtacagtcaacaagaaatccttaggtgcttagtacttgccctgagtgggggaagacaatgttggcaaagcaaacgaaagcgtgtctttgccgtctgcaagctcacagtcttagttgtgatggctgatttctagggatgcctagagagctggagcatcttaatttcaagtgaggctgacagaacctttcagcaagaagttagcattagaattagcagaccaagtctagatccctctgaccgatatgcatgggcaccggcacccatcaaatgggggcccaacatagtagatgaggtgaagggagacaaatggcgttctagtctgatctaggacacccactatccactgcttgtttgcagagccctagacttcactccctcccacctcattccctcatggtcttcggacaaggactagctcaccactgactttcttggctctccagcttatacactgcagatgcaggctttctataagcaaacacctaaagcaattcccacaataaagatataggaatgcttatatctgtaagcatctgtatcagtccttctggttgtgtgtcactgtagaagcatgactcacagagaactgggttccgatggtggtttacagagagaagaattttcaggatgagttttcagaattgcatttggggttttcggtgttgtccaatctccttgatttgaggacattgtggattctgtttcttgtagtaaacactggtcatctgcgttatgaaatatttatagaaatacccaagataggccttggtacttcttatcaaccccttatagggtgcaagaagctgaatgactctaccatttcagcacctcttaggggatgcaggaatgtggcgacattgcttggttactcccagtgttactggacccagtattggttgaaaaggatgagcttggggatgggaattcccagatcagacacacataaacagcttgtgcttctgagtgtgtcaagaccagggccttcttggctgcactagcagggacagattgctgaaagccaaagtccggacctcccattgggaacttggtgaaatttgtaaagacccattggggtagggcatattgggctatcccttctatgtgaaagaaaagtaattacttataacgtgtcctacaaccaagacacacacacacacacacacacacacacaagcaagctccttgggcctggctaggtttggaagcagcagtctcctttgggaagctgtcacaccctgactcattactgactgccatgaaaggctgttcctggtttttgctttgttttgttctttttgtctttcactcatgaccaagaataaaagaagtcccttgctgtgtctaggccgctatgcaggcacctcatgactgtgctggtctagagaagctcaggcgggcctatagctcatggggttgtttggagctctgttcagggccccattggtgattcgtgacacagcgctttaggatttcagagcaaggccccgctatcatcaaagttaaaatctagaagattacaaacagcttagcaataaaactgaagcagcaataaaaacatctccccataaagaaaaatccagggctaggtggagtcactgttagctcttcaaaaaagtataataaaagcataacgtgaagagtctagagacaggttgcctgtgactattggcccaggagtataccagctgtatgatactgacaacgctccctttcctaaggctcattttctttacgaatgtgcactacattcagatcttcctaggagaggtgcgagctttgaagaagacacaccataccaaccacttacaacggaaggagctgagtcctctcaggatcttctcttcttgatactcttaagttacaaaggaagagaagaagctaacataaatcagatggacagcaataatctttagttttgtttagggacccacatttctaagtaggttgggacgttcaaagagggagatgatgttcgggcataaggtaggctgggcacgtgtaacagtggtccagagtggcccttagaggagaaacagtcaactgtgtcttcagcaatgaagaaacacttcctggaaccggtggcttctacaggaaagtgcctggtcagtaggtctctccgcccgccccctaccttcctgtttgtacactggacaggagtgtgaatttccaggactcgactcacaagtcctgggttggcatctttagtgaggtgccacagacttcccttttgctttgtgtgtgactgtgcactttcggtgacaagcatagaaagttaagtgatgtctttgaggttccgtttcttaagtgctaggggtgtgttgttgttgtgtttcatttaaaactaagcttttaccacctggtcccagtggtcctgcaacggcatcagagtggagcagctgaccacctccctccatagctcctaaggaatcatttctttacctaaggcaagcttagccagttcctttagactttgcatcacagtcatccttaggtgggatggagtgtaccctctatagaacagatgaccttcctggacggagcagcagcacctcagcttgtcccgcctctctcttcaaggggaatataaacctactgatatttctgtaaggccaggggaatccttatatcaatgcccctcgtctacatatatgtggattcccctaaaaggaccctggtaggctacgtcacgttattctctgagttagacagtaccatgccttccttcccgcattagctccttaagtacgactcagctgtgtctggacagtgtcttgtgctcggattctgtgtcgttttctatttcaaatgtctacttgcttacccataggctttcgtagactagctagacttggtcggacattccttttaaacagtattgatttttttttctagacacataagactggacaatatgcatgcacatgttctcctgaaactacactgtcttgtttctgagcagagagcagcagattagctgtgtcctttcttatgtgtatagttctcataagatcatagagttccttgaggagcctcgtcacaagcctcccccatcctctcttcttcaaagcaatcgataagtagtaccaggcacttgtattttaaaagaagcctctgaatgaatgaatatatatatatatatatatatatatatatatatatatatatatatatattagagcattaatgaaaataaagatcaaatacccatgcgttccatctttatggtgacttaaggaaacaaaataaagtgtcctaaaatttttcttttaaaggtgggtatggagagctggctcaggggttgaaagcccttgctgctcttgcagagaatgctatgggtttggtttccagcaccaacatggcagctcacaatcatctgtaactctggtttcggggggggggggttgtgatgcacttctctgccctgcacatataccagtcactcacgaggtacatgcgcatatatgtaggcaaaacacttacacacataatacaaaattagcctttggggaggaccctcctgtgtctattggggggaaccctcctgtgtctaggctgttttcaggactagggagaggcagaatgtctttttgttattaatacagaggctcaaagtaacatgggaagtgcagaatctctaccttgggcctgtaggcaggtggacacggtctgtgaagccatgagcagccaggcaagaagggcagtccataagcatagagcattgccagaagtctcagaaggcaacagtgagggcaaaacggggtgttaataagaagggtgggcacattgaacaaactgaatactgtcctggcactctctctgagtaagaacaaccttgcacccatgatccatatattgcatcagggccagtgttccacagttatctggaaatggcacctcacgtccaggacacatggcagatgtgaggactaatcccacagtcttcttacctgatagatcctgaagagataatgtggtccacttctttcacttcagggaactgaccagaactcacacacatatcaatcaaactgtaaccctctcgtaaggctccagagttcttttgactcttagatgatttgacacatttgcccttgggtgatagagaagttcaggggcaactgtgccctaaatggaaagcatcctagaacttgggggtttgttttcattcatgtatgttgacccagatcagctcctaacccgttatcctcctgtctcagtctctggagtgctggcagtgaggcaagacattaagccaacagctttggtgacctgctgctgctcttctttccagactcggaactcgctctgatgtacaacgactcctcggtcctagagaaccatcacttggcggtgggctttaagttgctccaggaagaaaactgtgacattttccagaatctgaccaaaaagcaaagacaatctttaaggaaaatggtcattgacattgtgagtaactaaaaaaaaaaaaaagagtttcaagttcttagagatgacctcaggttcgacccgtaggaacggcctctgctgtctccagcaggctccttttgtaatggagtctgttcgtagcagttgggatttaaggcaaagggcctcattagtcaggctggctcctgaggccctctcagccaggagcaagacagaaggacgactcagctgaagcagagtatcctctgcaattccagtggagcctttccctccttccccacccacttaaaattaccttcaacttgactctcctctccctgtacattattcagagtagtgtgacaatgggaaaaaaaatctgtggctattacaaaattatacttaattgaaaaaattacattcagttattcaatttctgtttggggtatgtatgtgtgcgcacacattccctagtgtacctatggactcagaggatgggttgtgggtggtccgttctctccttttaccaactgggctctaagggtcaaattcaggtcatcgggcttggtgactagcacctttataatacccagctgtcttgtcagcccccaaagtacatttccaagttgtgttggacacagggaagcattgtttgtccttggtcagcaacaaaacaaaactaactggaacaccgtgcatcctaagcgctgtgtgaggagccttgaatcaatgtgttacaggtcagcaaaggctcagtagttcagaacaagcgcagacaatcatggtggtttttaccttgagagtgtcaggcagacatctaatgaatgtttctgccttgtgcatgtttttctggcctcccagaaaacgtggcatcagtgaggaagagagaccccccacacacacacacaagaagaagtcatctccattgttacttcatacctcatcatcttactttatcatagtgattctccattccgcctgaaactcaaaataatgtctgtccgtttgcaaatccgccttccttctggctttagttcatagaaccatctttgccctgtcaggtcctggcgacagacatgtcgaagcacatgaacctgctggctgatctgaaaaccatggttgaaaccaagaaggtgacaagctccggcgtcctcctcctggataactactccgacaggatccaggtaagccagtggctgagtttgctctttatgcacacagcagtgtctgaagaagacaagagccagggcttcttcatctcacctcatgcattcagaagctacactcgggagctttatcttactcttctttgtctttaattgaaaagaaaatagtgctcacacaatagtttctgatggtagcttctccccgcccccaacctccactcagagccttcccaccaccctacccacccaactccatctcctttttttctttgtttagaaagcaagcaaacaaaaaccacacaatcagaaaacacaatatacatgcaaaagaccagtaagaaaaaaaaattctagtcctttgcagctaaaccggtaaaatcatattggcctgttcattcgcacatacaatagcaactaaaacaaaaactcgacatccaaaacctgaccatttgagcagctaggaacttaatctttggtgcacacaaacaaacagtgcctctcaagacagttaaatgcagaagtggcataattcagaactattaatacaggtgtgaagcgcagaggcacagcatggttgaaatacatctgacactacgtgtatttttaagtgtcacagtcatctgatgtgaattcctagtttcaaaccagaaagagcagctgccgaataagaaatgcctccatccaccccaggtccttcagaatatggtgcactgtgcagacctgagcaaccccacaaagccactccagctgtaccgccagtggacggaccggataatggaggagttcttccgccagggggaccgagagcgggagcgtggcatggagataagtcccatgtgtgacaagcacaacgcctctgtggaaaaatcacaggtaattcagcaacacacagaagggcggagccaccgctgaagcacttggctgctctgtccttctacctcacagtattggttggtttgtttgtgtgttttttaaattacttgggatttgacacgatagacttcatttctgttgatgattcaaagaattttcttacgatttacagtcacatagccatacgtatggtacaagagtctctcactgggactctgtccatctaatgtactccatacatagaatgattggcttgtttcagttatctctacaaattggctattctcaaataaggtccaggacctacaccttcctatgtaaataactagttttctttatattgttaagtatcccttgagataagagttctaactttggccagctaacaaccatactttcgtgatctgttggctcaaactgaccaatttaccaaactcgggttagtaatattctatgcaggctccatgggggaaccgtgatttggttgagcttctccaagtttcttaggcccactggttttcttctttttttatgaccaggtgggcttcatagactatatcgttcatccactctgggagacgtgggcagacctcgtacatcccgatgcccaggacatcttggacactttggaggacaatcgtgagtggtaccagagcacaatcccccagagcccctcccctgcacctgatgaccaagaggagggccggcagggacagactgaaaaattccagtttgaactaaccttggaggaagactgcgagtcagacactgaaaaggacagtggaagtcaggtggaggaagacactagctgcagtgactctaagactctgtgcacccaagactcagagtccactgaaattccccttgacgagcaggttgaggaggaagctgtagcggaagaggaaagccagcctgaaacttgcgtcccagatgactgctgtcctgatacgtaacagcataaaggctgtcccactctttctgtttttttggttttttgttttttttttaaagtagaaaaatattgtttccaaagtgcatgtcacatgccacaaccatggtcacacctcactgtcatctgccaggacgtttgttgaacaaaactgaccttgaactactcagtctggcgctcaggaatattgtaaccagttttctcacccaccccacccccccatgtcatcggagaagagagatgtcttcacgtacaggacgtggacgtgacgtcagcttggcagagctgacaaagcggataaaattgactccaactgttttcaagggagcctgtggcccatccagctgcccagacgctaagatcggattgcagggttcctttctggtttgcttgcaaacgtgttaagaagaaagaaggcatttgatgacgcgtgtgaactcacagaggaagcaatgagagcgtcatgaacaggacacagcttggatctgtcccctggaggaggatgagccacagaaattgcatacttttctaatttcaagtcttcctgataacatgactgaacagtgtggttcagtgagccacactcacctctctctacattttgtatgatatgtaaaacagattttttgtagagcttacttttattattaaatgtattgaggtattatatttaaaaaacaaaacaaaactctgttcagaacttcatctaccactggtttttgtttttttgttttgttttgtttttttgggtttttttttttttttctaagaagtaacttgcaagttttcagtacagatcagtactacactggagaaatctcatttacgaattttactcgcaccttagaggtcatagcaatgaactgatttgtagtgattcattcttttatataccgatgacttccatactctaaaacagagaaacaaatttatgttgcgggaaaaccccttttgtaagtgtccattggctcctcctttacttccactcctccacctgccaggggagtctgctctcccacattgctcccctcactgtgtgcaaagtgagtatttattctgtaatacgttaatgtgcattacgtccagtgttgtcttaaacctcataggagctcagtcgtcagcctctgttgtctgaagtaaatgggagatatataaatacccagtagctaaaacagtcaggtcttttccaggcattttcctacccactgccttctggtaatttcctccccccccccccccccccgccctgtctcaggagacatgcattcacaaatgctgtccttgtagtcacccgaacatttcaccatcattttattgttgctcacagccagttacaggaagaaaaacattttcgcatcctgttgcttggtttaatgcctatgccagcctctgcacttgttcacttgatgggggtcttaccaagtctgtcactaccattctgaccgaggaaaaagaaacaggttgtcagggtagggctgaagttcaattcttctacatggttctgtcttctctagctttttcctctgaggttgcagaggaaaagcatgctaagtgttatataggcaggtcttaagactgtcagctgtctctatcgacaaataccaggacagctgttgtttgaactgcccagggaagcgagacctccgtgaggagcagccctgggaagtggttctgagtgtcgaagctgctctctcctaatggacagtctggtaacatgtggactttgctattgattcttcttgctccatcagcttgtcccataggaaggactgctgcagacacactaaaggagagtggatgataccgctggctccaggcggatcgttatgcgatgggatctaaaccagtggattgtgtgagtctgcctcagtagaacattaagagaggaatccagatttcagctccaggaactctgtgaatttatggcttagttcccagggttaacttgctgataccagtcagcctcgtgcagcatgtgtctagcctagaccttagttgtcttcttggtgtaaggtttggagcccatgctaattttcctttatggcacccaaatggggactaaaggagagggtggtatatgaccaaatggaaaaggaaacgtttaagaaaagtcctaagtctg

SEQ ID NO: 1693 - DNA, 2554 bp, Mus musculus
aacagtccgctcaccacctgccctcaaatgaactaaaggaatttaccaaagctcgagagggagagagtgaggagagcctgtcttgtaagcatttcagttgcctctgagtgagtaacagttgcagcgagagcaccaacattggaagcagccagtggcatccaaactactgagagccgcaccatggagagggacacttgtgatgtactctctcggagcaaaagtgcctctgaggaaacactgcactcctgtaatgaagaagaggacccttttcgtggaatggagccctatctcgtacggcgactttcttcccgcagcattcagcttccacctctggccttcagacagttggaacaagcagacttgcgaagcgaatcagagaacatccctcggccaactagcctccccttgaaaatcctgcctctgatcgccgtcacatctgcagactcaagtggtttcgatgtggacaatggcacatcagcgggacggagtcccttggatcccatgaccagcccagggtctgggctgattctccaagcaaactttgtccacagtcaacgccgggagtccttcctgtaccgatctgacagcgactatgacctctctccaaagtctatgtccaggaactcctcgattgccagtgatatacatggagatgacttgattgtgaccccgtttgctcaggtcttggctagcctgcgaaccgtacggaacaactttgctgcgttaacgaatttgcaagaccgagcacccagcaaaagatcacccatgtgcaaccaaccatccatcaacaaagccaccatcacagaggaggcctaccagaaactggccagcgagaccctggaggagctggactggtgtctggaccagctagagaccctgcagaccaggcactccgtcagtgagatggcctccaacaagttcaaaaggatgctgaaccgggagctcacgcatctctctgagatgagtcggtctggcaaccaggtgtcggagtacatctcaaacacatttctcgataagcaacatgaagtggaaatcccctctccaactcagaaggaaaaggagaagaagaaaaggccgatgtcgcagatcagtggggtcaagaagttgatgcacagctccagcctaactaattcatgtatccccaggtttggggttaaaacggagcaggaagatgtcctggccaaggaactagaagatgtgaacaagtggggcctccacgttttccgaatagcagagctgtctggtaaccggcctctgactgttatcatgcacaccatttttcaggaacgagatttgttaaaaacgtttaaaatcccagtagacactttgattacgtatcttatgactctggaagaccattaccatgctgacgtggcctatcacaacaacatccatgctgcagacgtcgtccagtccactcacgtgctgctctctacacccgctttggaggctgtgttcacagacttggagattctcgcggccatttttgccagtgcaatacatgatgtggaccatcctggggtgtcaaatcaatttctgatcaatacaaactcggaactcgctctgatgtacaacgactcctcggtcctagagaaccatcacttggcggtgggctttaagttgctccaggaagaaaactgtgacattttccagaatctgaccaaaaagcaaagacaatctttaaggaaaatggtcattgacattgtcctggcgacagacatgtcgaagcacatgaacctgctggctgatctgaaaaccatggttgaaaccaagaaggtgacaagctccggcgtcctcctcctggataactactccgacaggatccaggtccttcagaatatggtgcactgtgcagacctgagcaaccccacaaagccactccagctgtaccgccagtggacggaccggataatggaggagttcttccgccagggggaccgagagcgggagcgtggcatggagataagtcccatgtgtgacaagcacaacgcctctgtggaaaaatcacaggtgggcttcatagactatatcgttcatccactctgggagacgtgggcagacctcgtacatcccgatgcccaggacatcttggacactttggaggacaatcgtgagtggtaccagagcacaatcccccagagcccctcccctgcacctgatgaccaagaggagggccggcagggacagactgaaaaattccagtttgaactaaccttggaggaagactgcgagtcagacactgaaaaggacagtggaagtcaggtggaggaagacactagctgcagtgactctaagactctgtgcacccaagactcagagtccactgaaattccccttgacgagcaggttgaggaggaagctgtagcggaagaggaaagccagcctgaaacttgcgtcccagatgactgctgtcctgatacgtaacagcataaaggctgtcccactctttctgtttttttggttttttgttttttttttaaagtagaaaaatattgtttccaaagtgcatgtcacatgccacaaccatggtcacacctcactgtcatctgccagg

SEQ ID NO: 1694 - protein, 745 aa, Mus musculus
MERDTCDVLSRSKSASEETLHSCNEEEDPFRGMEPYLVRRLSSRSIQLPPLAFRQLEQADLRSESENIPRPTSLPLKILPLIAVTSADSSGFDVDNGTSAGRSPLDPMTSPGSGLILQANFVHSQRRESFLYRSDSDYDLSPKSMSRNSSIASDIHGDDLIVTPFAQVLASLRTVRNNFAALTNLQDRAPSKRSPMCNQPSINKATITEEAYQKLASETLEELDWCLDQLETLQTRHSVSEMNKFKRMLNRELTHLSEMSRSGNQVSEYISNTFLDKQHEVEIPSPTQKEKEKKKRPMSQISGVKKLMHSSSLTNSCIPRFGVKTEQEDVLAKELEDVNKWGLHVFRIAELSGNRPLTVIMHTIFQERDLLKTFKIPVDTLITYLMTLEDHYHADVAYHNNIHAADVVQSTHVLLSTPALEAVFTDLEILAAIFASAIHDVDHPGVSNQFLINTNSELALMYNDSSVLENHHLAVGFKLLQEENCDIFQNLTKKQRQSLRKMVIDIVLATDMSKHMNLLADLKTMVETKKVTSSGVLLLDNYSDRIQVLQNMVHCADLSNPTKPLQLYRQWTDRIMEEFFRQGDRERERGMEISPMCDKHNASVEKSQVGFIDYIVHPLWETWADLVHPDAQDILDTLEDNREWYQSTIPQSPSPAPDDQEEGRQGQTEKFQFELTLEEDCESDTEKDSGSQVEEDTSCSDSKTLCTQDSESTEIPLDEQVEEEAVAEEESQPETCVPDDCCPDT

SEQ ID NO: 1695 - DNA, 4224 bp, Mus musculus
aagacagcgaggaaatccgtttctcccaagctctccccggtgatttctcccaggaattcccccaggctcctgcgcaggatgcttctgagtagcaacatccccaaacagcgccgcttcacagtggcacatacatgtttcgatgtggacaatggcacatcagcgggacggagtcccttggatcccatgaccagcccagggtctgggctgattctccaagcaaactttgtccacagtcaacgccgggagtccttcctgtaccgatctgacagcgactatgacctctctccaaagtctatgtccaggaactcctcgattgccagtgatatacatggagatgacttgattgtgaccccgtttgctcaggtcttggctagcctgcgaaccgtacggaacaactttgctgcgttaacgaatttgcaagaccgagcacccagcaaaagatcacccatgtgcaaccaaccatccatcaacaaagccaccatcacagaggaggcctaccagaaactggccagcgagaccctggaggagctggactggtgtctggaccagctagagaccctgcagaccaggcactccgtcagtgagatggcctccaacaagttcaaaaggatgctgaaccgggagctcacgcatctctctgagatgagtcggtctggcaaccaggtgtcggagtacatctcaaacacatttctcgataagcaacatgaagtggaaatcccctctccaactcagaaggaaaaggagaagaagaaaaggccgatgtcgcagatcagtggggtcaagaagttgatgcacagctccagcctaactaattcatgtatccccaggtttggggttaaaacggagcaggaagatgtcctggccaaggaactagaagatgtgaacaagtggggcctccacgttttccgaatagcagagctgtctggtaaccggcctctgactgttatcatgcacaccatttttcaggaacgagatttgttaaaaacgtttaaaatcccagtagacactttgattacgtatcttatgactctggaagaccattaccatgctgacgtggcctatcacaacaacatccatgctgcagacgtcgtccagtccactcacgtgctgctctctacacccgctttggaggctgtgttcacagacttggagattctcgcggccatttttgccagtgcaatacatgatgtggaccatcctggggtgtcaaatcaatttctgatcaatacaaactcggaactcgctctgatgtacaacgactcctcggtcctagagaaccatcacttggcggtgggctttaagttgctccaggaagaaaactgtgacattttccagaatctgaccaaaaagcaaagacaatctttaaggaaaatggtcattgacattgtcctggcgacagacatgtcgaagcacatgaacctgctggctgatctgaaaaccatggttgaaaccaagaaggtgacaagctccggcgtcctcctcctggataactactccgacaggatccaggtccttcagaatatggtgcactgtgcagacctgagcaaccccacaaagccactccagctgtaccgccagtggacggaccggataatggaggagttcttccgccagggggaccgagagcgggagcgtggcatggagataagtcccatgtgtgacaagcacaacgcctctgtggaaaaatcacaggtgggcttcatagactatatcgttcatccactctgggagacgtgggcagacctcgtacatcccgatgcccaggacatcttggacactttggaggacaatcgtgagtggtaccagagcacaatcccccagagcccctcccctgcacctgatgaccaagaggagggccggcagggacagactgaaaaattccagtttgaactaaccttggaggaagactgcgagtcagacactgaaaaggacagtggaagtcaggtggaggaagacactagctgcagtgactctaagactctgtgcacccaagactcagagtccactgaaattccccttgacgagcaggttgaggaggaagctgtagcggaagaggaaagccagcctgaaacttgcgtcccagatgactgctgtcctgatacgtaacagcataaaggctgtcccactctttctgtttttttggttttttgttttttttttaaagtagaaaaatattgtttccaaagtgcatgtcacatgccacaaccatggtcacacctcactgtcatctgccaggacgtttgttgaacaaaactgaccttgaactactcagtctggcgctcaggaatattgtaaccagttttctcacccaccccacccccccatgtcatcggagaagagagatgtcttcacgtacaggacgtggacgtgacgtcagcttggcagagctgacaaagcggataaaattgactccaactgttttcaagggagcctgtggcccatccagctgcccagacgctaagatcggattgcagggttcctttctggtttgcttgcaaacgtgttaagaagaaagaaggcatttgatgacgcgtgtgaactcacagaggaagcaatgagagcgtcatgaacaggacacagcttggatctgtcccctggaggaggatgagccacagaaattgcatacttttctaatttcaagtcttcctgataacatgactgaacagtgtggttcagtgagccacactcacctctctctacattttgtatgatatgtaaaacagattttttgtagagcttacttttattattaaatgtattgaggtattatatttaaaaaacaaaacaaaactctgttcagaacttcatctaccactggtttttgtttttttgttttgttttgtttttttgggtttttttttttttttctaagaagtaacttgcaagttttcagtacagatcagtactacactggagaaatctcatttacgaattttactcgcaccttagaggtcatagcaatgaactgatttgtagtgattcattcttttatataccgatgacttccatactctaaaacagagaaacaaatttatgttgcgggaaaaccccttttgtaagtgtccattggctcctcctttacttccactcctccacctgccaggggagtctgctctcccacattgctcccctcactgtgtgcaaagtgagtatttattctgtaatacgttaatgtgcattacgtccagtgttgtcttaaacctcataggagctcagtcgtcagcctctgttgtctgaagtaaatgggagatatataaatacccagtagctaaaacagtcaggtcttttccaggcattttcctacccactgccttctggtaatttcctccccccccccccccccccgccctgtctcaggagacatgcattcacaaatgctgtccttgtagtcacccgaacatttcaccatcattttattgttgctcacagccagttacaggaagaaaaacattttcgcatcctgttgcttggtttaatgcctatgccagcctctgcacttgttcacttgatgggggtcttaccaagtctgtcactaccattctgaccgaggaaaaagaaacaggttgtcagggtagggctgaagttcaattcttctacatggttctgtcttctctagctttttcctctgaggttgcagaggaaaagcatgctaagtgttatataggcaggtcttaagactgtcagctgtctctatcgacaaataccaggacagctgttgtttgaactgcccagggaagcgagacctccgtgaggagcagccctgggaagtggttctgagtgtcgaagctgctctctcctaatggacagtctggtaacatgtggactttgctattgattcttcttgctccatcagcttgtcccataggaaggactgctgcagacacactaaaggagagtggatgataccgctggctccaggcggatcgttatgcgatgggatctaaaccagtggattgtgtgagtctgcctcagtagaacattaagagaggaatccagatttcagctccaggaactctgtgaatttatggcttagttcccagggttaacttgctgataccagtcagcctcgtgcagcatgtgtctagcctagaccttagttgtcttcttggtgtaaggtttggagcccatgctaattttcctttatggcacccaaatggggactaaaggagagggtggtatatgaccaaatggaaaaggaaacgtttaagaaaagtcctaagtctg

SEQ ID NO: 1696 - protein, 699 aa, Mus musculus
KTARKSVSPKLSPVISPRNSPRLLRRMLLSSNIPKQRRFTVAHTCFDVDNGTSAGRSPLDPMTSPGSGLILQANFVHSQRRESFLYRSDSDYDLSPKSMSRNSSIASDIHGDDLIVTPFAQVLASLRTVRNNFAALTNLQDRAPSKRSPMCNQPSINKATITEEAYQKLASETLEELDWCLDQLETLQTRHSVSEMNKFKRMLNRELTHLSEMSRSGNQVSEYISNTFLDKQHEVEIPSPTQKEKEKKKRPMSQISGVKKLMHSSSLTNSCIPRFGVKTEQEDVLAKELEDVNKWGLHVFRIAELSGNRPLTVIMHTIFQERDLLKTFKIPVDTLITYLMTLEDHYHADVAYHNNIHAADVVQSTHVLLSTPALEAVFTDLEILAAIFASAIHDVDHPGVSNQFLINTNSELALMYNDSSVLENHHLAVGFKLLQEENCDIFQNLTKKQRQSLRKMVIDIVLATDMSKHMNLLADLKTMVETKKVTSSGVLLLDNYSDRIQVLQNMVHCADLSNPTKPLQLYRQWTDRIMEEFFRQGDRERERGMEISPMCDKHNASVEKSQVGFIDYIVHPLWETWADLVHPDAQDILDTLEDNREWYQSTIPQSPSPAPDDQEEGRQGQTEKFQFELTLEEDCESDTEKDSGSQVEEDTSCSDSKTLCTQDSESTEIPLDEQVEEEAVAEEESQPETCVPDDCCPDT

SEQ ID NO: 1697 - DNA, 4136 bp, Mus musculus
caagatccaggtctacaagttccctgaggacaacggaggcagtttgtttcgatgtggacaatggcacatcagcgggacggagtcccttggatcccatgaccagcccagggtctgggctgattctccaagcaaactttgtccacagtcaacgccgggagtccttcctgtaccgatctgacagcgactatgacctctctccaaagtctatgtccaggaactcctcgattgccagtgatatacatggagatgacttgattgtgaccccgtttgctcaggtcttggctagcctgcgaaccgtacggaacaactttgctgcgttaacgaatttgcaagaccgagcacccagcaaaagatcacccatgtgcaaccaaccatccatcaacaaagccaccatcacagaggaggcctaccagaaactggccagcgagaccctggaggagctggactggtgtctggaccagctagagaccctgcagaccaggcactccgtcagtgagatggcctccaacaagttcaaaaggatgctgaaccgggagctcacgcatctctctgagatgagtcggtctggcaaccaggtgtcggagtacatctcaaacacatttctcgataagcaacatgaagtggaaatcccctctccaactcagaaggaaaaggagaagaagaaaaggccgatgtcgcagatcagtggggtcaagaagttgatgcacagctccagcctaactaattcatgtatccccaggtttggggttaaaacggagcaggaagatgtcctggccaaggaactagaagatgtgaacaagtggggcctccacgttttccgaatagcagagctgtctggtaaccggcctctgactgttatcatgcacaccatttttcaggaacgagatttgttaaaaacgtttaaaatcccagtagacactttgattacgtatcttatgactctggaagaccattaccatgctgacgtggcctatcacaacaacatccatgctgcagacgtcgtccagtccactcacgtgctgctctctacacccgctttggaggctgtgttcacagacttggagattctcgcggccatttttgccagtgcaatacatgatgtggaccatcctggggtgtcaaatcaatttctgatcaatacaaactcggaactcgctctgatgtacaacgactcctcggtcctagagaaccatcacttggcggtgggctttaagttgctccaggaagaaaactgtgacattttccagaatctgaccaaaaagcaaagacaatctttaaggaaaatggtcattgacattgtcctggcgacagacatgtcgaagcacatgaacctgctggctgatctgaaaaccatggttgaaaccaagaaggtgacaagctccggcgtcctcctcctggataactactccgacaggatccaggtccttcagaatatggtgcactgtgcagacctgagcaaccccacaaagccactccagctgtaccgccagtggacggaccggataatggaggagttcttccgccagggggaccgagagcgggagcgtggcatggagataagtcccatgtgtgacaagcacaacgcctctgtggaaaaatcacaggtgggcttcatagactatatcgttcatccactctgggagacgtgggcagacctcgtacatcccgatgcccaggacatcttggacactttggaggacaatcgtgagtggtaccagagcacaatcccccagagcccctcccctgcacctgatgaccaagaggagggccggcagggacagactgaaaaattccagtttgaactaaccttggaggaagactgcgagtcagacactgaaaaggacagtggaagtcaggtggaggaagacactagctgcagtgactctaagactctgtgcacccaagactcagagtccactgaaattccccttgacgagcaggttgaggaggaagctgtagcggaagaggaaagccagcctgaaacttgcgtcccagatgactgctgtcctgatacgtaacagcataaaggctgtcccactctttctgtttttttggttttttgttttttttttaaagtagaaaaatattgtttccaaagtgcatgtcacatgccacaaccatggtcacacctcactgtcatctgccaggacgtttgttgaacaaaactgaccttgaactactcagtctggcgctcaggaatattgtaaccagttttctcacccaccccacccccccatgtcatcggagaagagagatgtcttcacgtacaggacgtggacgtgacgtcagcttggcagagctgacaaagcggataaaattgactccaactgttttcaagggagcctgtggcccatccagctgcccagacgctaagatcggattgcagggttcctttctggtttgcttgcaaacgtgttaagaagaaagaaggcatttgatgacgcgtgtgaactcacagaggaagcaatgagagcgtcatgaacaggacacagcttggatctgtcccctggaggaggatgagccacagaaattgcatacttttctaatttcaagtcttcctgataacatgactgaacagtgtggttcagtgagccacactcacctctctctacattttgtatgatatgtaaaacagattttttgtagagcttacttttattattaaatgtattgaggtattatatttaaaaaacaaaacaaaactctgttcagaacttcatctaccactggtttttgtttttttgttttgttttgtttttttgggtttttttttttttttctaagaagtaacttgcaagttttcagtacagatcagtactacactggagaaatctcatttacgaattttactcgcaccttagaggtcatagcaatgaactgatttgtagtgattcattcttttatataccgatgacttccatactctaaaacagagaaacaaatttatgttgcgggaaaaccccttttgtaagtgtccattggctcctcctttacttccactcctccacctgccaggggagtctgctctcccacattgctcccctcactgtgtgcaaagtgagtatttattctgtaatacgttaatgtgcattacgtccagtgttgtcttaaacctcataggagctcagtcgtcagcctctgttgtctgaagtaaatgggagatatataaatacccagtagctaaaacagtcaggtcttttccaggcattttcctacccactgccttctggtaatttcctccccccccccccccccccgccctgtctcaggagacatgcattcacaaatgctgtccttgtagtcacccgaacatttcaccatcattttattgttgctcacagccagttacaggaagaaaaacattttcgcatcctgttgcttggtttaatgcctatgccagcctctgcacttgttcacttgatgggggtcttaccaagtctgtcactaccattctgaccgaggaaaaagaaacaggttgtcagggtagggctgaagttcaattcttctacatggttctgtcttctctagctttttcctctgaggttgcagaggaaaagcatgctaagtgttatataggcaggtcttaagactgtcagctgtctctatcgacaaataccaggacagctgttgtttgaactgcccagggaagcgagacctccgtgaggagcagccctgggaagtggttctgagtgtcgaagctgctctctcctaatggacagtctggtaacatgtggactttgctattgattcttcttgctccatcagcttgtcccataggaaggactgctgcagacacactaaaggagagtggatgataccgctggctccaggcggatcgttatgcgatgggatctaaaccagtggattgtgtgagtctgcctcagtagaacattaagagaggaatccagatttcagctccaggaactctgtgaatttatggcttagttcccagggttaacttgctgataccagtcagcctcgtgcagcatgtgtctagcctagaccttagttgtcttcttggtgtaaggtttggagcccatgctaattttcctttatggcacccaaatggggactaaaggagagggtggtatatgaccaaatggaaaaggaaacgtttaagaaaagtcctaagtctg

SEQ ID NO: 1698 - protein, 669 aa, Mus musculus
RSRSTSSLRTTEAVCFDVDNGTSAGRSPLDPMTSPGSGLILQANFVHSQRRESFLYRSDSDYDLSPKSMSRNSSIASDIHGDDLIVTPFAQVLASLRTVRNNFAALTNLQDRAPSKRSPMCNQPSINKATITEEAYQKLASETLEELDWCLDQLETLQTRHSVSEMNKFKRMLNRELTHLSEMSRSGNQVSEYISNTFLDKQHEVEIPSPTQKEKEKKKRPMSQISGVKKLMHSSSLTNSCIPRFGVKTEQEDVLAKELEDVNKWGLHVFRIAELSGNRPLTVIMHTIFQERDLLKTFKIPVDTLITYLMTLEDHYHADVAYHNNIHAADVVQSTHVLLSTPALEAVFTDLEILAAIFASAIHDVDHPGVSNQFLINTNSELALMYNDSSVLENHHLAVGFKLLQEENCDIFQNLTKKQRQSLRKMVIDIVLATDMSKHMNLLADLKTMVETKKVTSSGVLLLDNYSDRIQVLQNMVHCADLSNPTKPLQLYRQWTDRIMEEFFRQGDRERERGMEISPMCDKHNASVEKSQVGFIDYIVHPLWETWADLVHPDAQDILDTLEDNREWYQSTIPQSPSPAPDDQEEGRQGQTEKFQFELTLEEDCESDTEKDSGSQVEEDTSCSDSKTLCTQDSESTEIPLDEQVEEEAVAEEESQPETCVPDDCCPDT

SEQ ID NO: 1699 - DNA, 3033 bp, Mus musculus
tggagtcctctcttctgacatctgactgaggagctgggggcctcctcacctccctgcctggatgaattctttgatttggactggacagcttcaaacagcatgggatctactttctccataaggaatgttgctgatatagacttctgttcgtcgtagtgagtggagctgaacaaggaaatggaacatgaacagcagacaggatcattaaaagaggtcccagataaaacctccagtgagaggagacctgtcccctagcaacaaatcacacacacgtttgctggcaacaacagtccgctcaccacctgccctcaaatgaactaaaggaatttaccaaagctcgagagggagagagtgaggagagcctgtcttgtaagaagcctttaaggcagagatctcctgtgagctgcactgaaagaggtctgcttcggaagaatttgatcctgctgagtagatgtggcacacttccaactgtacgtgttgcgctgccccggaacacagttgtgtgaggaacacagacatgcacgaagcggctagcttttagaaggcactaatcccagtggggataaggcatttcagttgcctctgagtgagtaacagttgcagcgagagcaccaacattggaagcagccagtggcatccaaactactgagagccgcaccatggagagggacacttgtgatgtactctctcggagcaaaagtgcctctgaggaaacactgcactcctgtaatgaagaagaggacccttttcgtggaatggagccctatctcgtacggcgactttcttcccgcagcattcagcttccacctctggccttcagacagttggaacaagcagacttgcgaagcgaatcagagaacatccctcggccaactagcctccccttgaaaatcctgcctctgatcgccgtcacatctgcagactcaagtggtttcgatgtggacaatggcacatcagcgggacggagtcccttggatcccatgaccagcccagggtctgggctgattctccaagcaaactttgtccacagtcaacgccgggagtccttcctgtaccgatctgacagcgactatgacctctctccaaagtctatgtccaggaactcctcgattgccagtgatatacatggagatgacttgattgtgaccccgtttgctcaggtcttggctagcctgcgaaccgtacggaacaactttgctgcgttaacgaatttgcaagaccgagcacccagcaaaagatcacccatgtgcaaccaaccatccatcaacaaagccaccatcacagaggaggcctaccagaaactggccagcgagaccctggaggagctggactggtgtctggaccagctagagaccctgcagaccaggcactccgtcagtgagatggcctccaacaagttcaaaaggatgctgaaccgggagctcacgcatctctctgagatgagtcggtctggcaaccaggtgtcggagtacatctcaaacacatttctcgataagcaacatgaagtggaaatcccctctccaactcagaaggaaaaggagaagaagaaaaggccgatgtcgcagatcagtggggtcaagaagttgatgcacagctccagcctaactaattcatgtatccccaggtttggggttaaaacggagcaggaagatgtcctggccaaggaactagaagatgtgaacaagtggggcctccacgttttccgaatagcagagctgtctggtaaccggcctctgactgttatcatgcacaccatttttcaggaacgagatttgttaaaaacgtttaaaatcccagtagacactttgattacgtatcttatgactctggaagaccattaccatgctgacgtggcctatcacaacaacatccatgctgcagacgtcgtccagtccactcacgtgctgctctctacacccgctttggaggctgtgttcacagacttggagattctcgcggccatttttgccagtgcaatacatgatgtggaccatcctggggtgtcaaatcaatttctgatcaatacaaactcggaactcgctctgatgtacaacgactcctcggtcctagagaaccatcacttggcggtgggctttaagttgctccaggaagaaaactgtgacattttccagaatctgaccaaaaagcaaagacaatctttaaggaaaatggtcattgacattgtcctggcgacagacatgtcgaagcacatgaacctgctggctgatctgaaaaccatggttgaaaccaagaaggtgacaagctccggcgtcctcctcctggataactactccgacaggatccaggtccttcagaatatggtgcactgtgcagacctgagcaaccccacaaagccactccagctgtaccgccagtggacggaccggataatggaggagttcttccgccagggggaccgagagcgggagcgtggcatggagataagtcccatgtgtgacaagcacaacgcctctgtggaaaaatcacaggtgggcttcatagactatatcgttcatccactctgggagacgtgggcagacctcgtacatcccgatgcccaggacatcttggacactttggaggacaatcgtgagtggtaccagagcacaatcccccagagcccctcccctgcacctgatgaccaagaggagggccggcagggacagactgaaaaattccagtttgaactaaccttggaggaagactgcgagtcagacactgaaaaggacagtggaagtcaggtggaggaagacactagctgcagtgactctaagactctgtgcacccaagactcagagtccactgaaattccccttgacgagcaggttgaggaggaagctgtagcggaagaggaaagccagcctgaaacttgcgtcccagatgactgctgtcctgatacgtaacagcataaaggctgtcccactctttctgtttttttggttttttgttttttttttaaagtagaaaaatattgtttccaaagtgcatgtcacatgccacaaccatggtcacacctcactgtcatctgccagg

SEQ ID NO: 1700 - protein, 745 aa, Mus musculus; identical to SEQ ID NO: 1694

SEQ ID NO: 1701 - DNA, 407820 bp, Homo sapiens
acatgggctgagtgttcagtaatcatttgtgttgagttcttcagtttcatggagactaaaattaggttttctctgtcactcttgtaatgtcatctgaccttgacctgcatttcaaattgctgagaagttagcaagctgacttttacactaggcacatcagaaataattgattaaaaatagagttattgaagttgaatttttttcatttatagaaaagtacaatgtcttgttcatgacaaacaaggcctaacatttatataatgttcatttaaaatatatcaaaagaaaacaaaataataaaacccacagaaaacccaaaaacaactcacctattaaaacatctcttgatttataaatattatagtttagtttgtacaatatcagtaactgtggaaagctcccaattatctcattcccaagtgcttgactgactcataacttaccaacaattttcttatttcagagaatcccaaaaacatattacctaggactaacctggaataaaacttcatggttgatagcttttatcaattaaatgggtattgatttggataactcataatcttgagcatatctttagatttactttttatcctgaatttatttttgttagtaagatttagaaattcagatttattttgtgctttatatgacatagaaaaaaacaaattgtctttcctgtacaaagtccacccttcaaaatagactccagaagaaaacatagagacttataacttaggttaaacataggcacaatcctaaatagtattcagatgagtcttacctgaataattgctcacctaatatgataatcacctgttaagaagcagtttcttaaatgtcactgttggaatctaaacagtagatacacaggtgttcactgtaaacttgtttcaatttttctgtatttttgaaaatgttcataataccatcttggggggaaaaagcctctttttgacatggcaagaaccatattctactgaaacagatcttatatgctctatcaagtttatattttagacatccctaattcagctcattctggactattccaggactgattgccctactaaggcatgcttatttttttctttatgtgtataagaaggattcaaagggaccgtttgtcagttttaatgtgtgagcactactgatatgttttattgagaaaaagcttactgccacagatcacagagatatttttccgaggtaagattcttgctggtttgcaagttttgtaaggaggcaccaggacccatctctgtacccccagccacggagcccttatttagacccacactgggctgaaatagaaacttctgtacaaatgtatctctcctgtgctctttccactttaacagaatagaaagaattgactggttgagcccaaatatttcccccaggccagtgttacaaactggcgtttcaccaaaaataactcatttgatatgtttttaatgttgatgatctgaaaaatcatcttcttgtttttgtttgtttgtttgtttttagagatagggtcttactctgtcagccaggctggagtgctggagttcagtggcacactcacaactcactgcagcctcgattcccaggttcaggtgattctcccacctcggcctcccaagtagctaggaccccaggcatgcaccaccatgcctggctaacttttctcttttttgtagagatgggatctagccatgtttcccaggctggtctccaactcctgggctcaagagatctgtccgccttggcctcccaaagtgctgggattacaggcatgagcttcatacctggctaccttcttcttaattatatacattttttcttaaataagagctcatgttattttttatttctataaatattttatattccttctcttcttattgccctgatactttaaataaacctaagcccagtcaaattttgtattacccttgagtttcagtttttggttcattcagccctaagttctctttgggcatgaattgttttcaccattgactactagcaggcagctggcatagcctgggacatgtgaggtgatgctaaacatgcatttgtgagtagaaggaaggaagaaaggagggaaggaaggaaggaaggtaggtaggaaggaaggaaggaaggtaggtgggtgggcaagagagagggaggaagaaaaaaaggaagggaggctggttggtttgattagctgttgaacaaaattccatatagaaagtagcttactagtctatatcttttagctctgtttatttcaaagctttgtgtgtttttgttagggtcacttatagaatatttagaaaaatacttgctgcctcatgcatttcaccatccagtgcctggtgagacctaaaagcccatagttataattttgtttctttgaccaaagtttgttttattttcaaatataaattcaatcccttaagactcacctatagcatatatatcaaacaaaaacacgtcaaatttaactcagaattttgctggataaatgattttactggatatcatctgaccaatgaaataacaattgtgtgttctcaaatttacttctacatttttaaggtagtaagtttaattaaaaatctctaatataaaaatggcttattctctaaaatttagaggtaagctaaagttttcatcaaggccccattatttagcactttccaaacttgggaaggtcacttaactccactgaaccagtagaaataaaattagtggtaacactgaaagcaaaaaccagaaccagtccaattgtcttattaataatagcctaattgtgtaaatgtctgttataaatttcttagctggttctgagagatagctagtaaatggcaccctaagttttatatattctgttacaaaacaaaaacaaataacaacaataagctgttttcttttgctgttactcaaacatctggatttctattgtagcccctagcacattgttacctttggttggatggactgaaaagtgttgtgatttttctcctatgtagaatattcagagggaaagtgcagggcagtgcacaatgcatacaaacattgacaggatcacttttcctcaagctgaactatactctaggcctcctctctctctagttaccacagttgaacccactcagcccctacttgcagcctcagtcccaccccaggctcacaggccaattttgtcctggaattaggaattgaaagatctcaggtaagccagccacaatggagacaagatttagagataagcaaaactgacttggactcacatgtctgtcatatattacctctgtggtgttagccaagttccttaacctctatgagtctcagatttctcatctataaagtggtgataataatgtctgctcgtgagttggaagattaagtaacatgtagatcttatacctgacaccaattgtttttcctgtgaaagttcaaaacttctcttatgatttaattcttcaaggaaggtgacctgacctttttcattcctgtatttacttatattccaggcatgtattggttaagatatacattttgcaattaagagggacctcaattttaacctcagatctgctactcattggctgtatgatcataggggcaagttacttcaacttcgtaagtcttcgtttcctcagtggtgatacagaataaaaataacacaaagcacacagataaattattatgaggataatatatagtataccctaaaattctgtgcagagtcttcagaacactttcatgttagttaccctattcagtcctctcaaaagctctttgcaatggctctctctcaaatgagaaccaaatggataagacattataactcagcaaggtcaataaacaccacagaataaacaccaaataagtggttgatatcatcatagtaaaatgaggaattagaaaagttaacccgacattatggtgatgtttggttcacaaactcattcagtgcacaggaagtgtccaagtaaggaaggggtctgaggatgacaggtactcaggaatgggaaagtttatgactgttggctccaacaaatggataaccagatttagcaagatattgaacagtcacggaaaaaatccacagcaccaaaatttagcacatgagatttttatttagggattcttggtattgggggtcttttttctttctcccaagggagtgattttgtttctcagcctagcaatttcatcactgcttttgcttatttgtaagcataattctaaaaagttggaagaagccatttctgtccttatttggtacgtggccaacaataagggtagcatgagttggagtcagtgttgcaactggtttcccaattaaacaacctgtctctaggatcccataagttttcaaaaaataagtagaaacatttctatatttaggagaagcttagggttttgagcaatcgagaaattctatcacctaatttttgtaaaatttcttgccacctaatttttttagatcttgtaaacaaagttcttagagggttttaatgctgcaaataaaacattaacatttcttcatatgattaaccttcaagatataacagctaatattttattcttacacacatgggatataaagatttcaaatagagaaaagtgttatctatcaaaactgaggactgatattctttttgaaactgataaaatggtatgcctatttaccatgctcatgaagtaaccaattggcaatttttagaacttaaagatgtttctaacagtataaaaatagttttcctacctctcccaaaagcttacaaacatcagtagtgtgtgcctaaaattttgtccagttttcagaatgtttttatataaattgccttattcagccctctccaaaactctttgcaatggctctcaaatgagaaccaaatgggtaagacactgaaactcagcaaggtcaggcaacaatcttcaaggtcacatggcaagttcatggcataactgtgactctaatctctaatcccctatacagtgctgccctgaaaacttgcccaatggtattttgattaaaaaaattaattaatcaatcaaataggaaaaagaaactaaataagccctacctaaattacctgttctgaaatttctgcccctatttaggcacatataagaatataatgtaaatgctccatcttatttttaagatgccctgaaaatattggtttgtccatttattaaacaaacataattgtggtttttatgtctctagactgtttgctaagcactgagtacccagagggaaagcagatgttatccatgttctcatagtgtttaggtctatcaggggagccagataccaaataagtcattactaatgtgatgacattgacaaagaggaagtacaaagtgcagtggagacctcacctggtatggggaggcagggaagacttccggaggaagtgaatttcaagatgtaatcctatatccaccactccttcactcaccagtcaatagctaagtaggatttttatttaagactgtattcatgagtagaatattaaatagaaagaatttttatgacttttaaaatcttcatatacagagaattgaacaagacaatcagtgacaccagaagacttttacacacttgttagaaaattgtgtcaaattatttatttcaaatgattagtctacattgatttcaagatttttaaagaatttgagtctagaaatattttttgaatagttagaaaaatctcttaggaacttgtcagtcatttagtagatattcaataaacataaaatttattttcttttccttccatttcttcctccatgatttctttccttcaatcccatttatccaagtaggctttatccaacaaagctttagaaggagctttgttagtttagtgaatagaaaagcttgacttagttgttttccaaattgctaaaaaaaatcctaaaattaatgtagatggaaaccttaagtgtctagtaaaacattttgattcacaatcatagtcatattgattttttatcattatatttaagcatgcctcttattgattgttttagtctatatcctgattttagctctttaattacagtttgtgtctgtttgtgtcctgggtcatatatgagtaatggatgcaattgtagaagcttaaaacacagagcatgctttcccagtgttcttaagaccatggggtaccttcaattctgttaatgttttactgttgccaagtcttaaaataattgtctcccatttcagaacatggaataattgacctttcgatcaagtagactcatataaggtttagaatgaatatttgaaagcaattcaaagaaaattttggtattattttgcaacacttccattttgagaaataacttatagttgattttgataagtaatgtaataaaaatcattttttacatttacttgtactgaatggatattagttttaaggagtacacaagccccgttatcaaactgccttttgtcacactcttttgcaatgtatcattctgaagatagaattacaacgacaccctcatcagaagtagatggtaaataacagtctgttatttgcttccacattaacttctgctggctttgagtctgtaaccagagactatttcaaaatacagcactatcctgaaacccactatctgcctgctctggtttcctgaagcaatgtctttcaacctaacgcaaccccactgatgtaactgcttatttctctgaagttcagctcaaccctcgtctcttccgtatgcctgttaactagagacttgatgcgcaagtaattgaatgcctatgtggattacgtttaacttatcccactctcaaatttgggagtttcatttttattcatagtagctatctcctataaaggaaattctgagtttctgtgtcagacaccgaaacccaaatttgccatttgtaacatctggaatcttggaaccaaaatcccagaaatattcaagaggcaaaaaagatgccttatttagagctctgcagaacataagagctaagttattggcaggagacgggcactttgctgatactttagtggggttaggacttacatggataacaattggatgggagcaatgtttagatttccgaatctggttttccctaggacatataaaattagtgtgcacaacttgtaaacataataatttgtctcagggatggaacatctctccttgctattgaatcatgcttttactaaaattcatctggaaaaataaacgcttaataaatgacagtaattagaatgttcaaaagatgtcttctttgttcttttatactctttgatacccatgaagtaaaaattataaacagcttgttgtattataaatgctagtaaagattcatcctagaaaatcattttatttaatttcttattttttccaaatgtctaaattctcatgtctgtgaaatattagccagttcttcaaaaacaatattgatatttctatttgaaatcaaggcttaattttgctcatgattaatctcagaaataagtagcttatttctatgaccttactgagacctggtaacctaagaaggattatgtgtaactgtgtggaagaaatgaaaaggaggcggtaagtaattatttaagaaaaaataatattaatattgacagacacttcttgtgtctgtaactgatttcacactaggaaaatgaagcagagtttcaattttcttgttcataatttcacatttacagttccattgttttatcttgcttaactgttctagatgactgcctttacaaagcagggggaaaagaaggaagaaatgtttttgacagtaatgaaaaagacaagattagttctccttccttgcacatttttagaaaaagttggacattccctagcagattcattctagattattcgtatgtccttgtagcttatcaattagatatccattaaatttgaatatccctttaaaaaggtaaatttgtaagcaaaggcagttaattatttgtgaaaatgtatactgctggctttagcctgaatacaaagatagggtttatcttgctatcagtaaaattgggataacaatgaaaatatttttctgcttccaaagtcgtatacataaactgtagcttttattagaaatcagtgatgctgtttcacctacaaaaatttaaacaccactggacaaaatgagagctttgtgttgcctggagggtgaaaaaagtccatctttgccagcaacatcccttctactcttctgcttgtctttgtggcctccctccccctccctttcacaccaagccacctcaccccaccagctgttagggactcctcccctctttacgcagatcaccagttatcttacactgtctggctttagtctcagatgaagacattctaataagcaccaagttgttcagctcagtgctaactctgccaggaatgtgtgcatttcctaagagctgccgaaaatggaaattaaatagtttgaaagaattaaatgataatggtggcatttcatacaccagaagggcagattggcatcagtgtaagcaccttttcagtccttctttgagaacaccaggaaagtggctacctgttttgctcatgcgaaatttggatctctatacaaaagcaaaaagacagtttgtgaagcgttacaatattgcaagttgattcagagagaatgtgttgtgtttatttttgaactctctgctcctccaaggttgctgctgttcagggcagttctcactcacccactttctttgagctcatgtctgataagaaagaggtgaaactgtaaaaaccttttctattactcgtctccaaagctgatatgaaacctgtagcattcttaagaacccctggtgtcctggatgctgttgtgaaaacaagcataatgtttaatgtcttgagcttttattgaaattatatgaatattcaagactcccttggtgtacaagagacagattgagctttagaggtctcaaaatttgcagatatggtgatgttcactgagctcaactcttggtcaattttgtccagttcagagagggttaaattcactcttgggcacttgaagcctctctaatcttatcctgaagaagtggcgctctcccttggtttacagttgaggtcacccgcggggcagtgtttggatacagactgatgaaattatgctgcattgttaacattgaataccactcagtggtgaggaccgatgacggcactagggtcctttgactccttgggtacaatttcttgaaatagatgctttcccaaaatgtcctggactcataaaatatatgaaggattctatttggctttcatcatttatttaatttgaaagaaagttgttttaacagatttatcagagttaagaaatgtttctagggaatagaaaatggacaagataattgatctttgttgtcagagtcatgcattgtaattcactctctaaggtgacgcagcatctccttgagggcaaagctgccaaaagttctgaaagtgatctgcctgtttttttttctcacactgacttttagagaggcgctggtattttcaagacgagtaaatcctgtttacatcctgtggaaggttggctaagaattatatccatctctttttaagagaagttgaaataaggaaaattatagttggcagttagctgtgtgaaatttagtaatctttgtcagatgagccagtcataggcatgtattttttaaaattttttaacgaagccctgtgggtttacattttttaaagttcacactgatataaaggtttacccacttcaatcacaccttttgttgtgtgtgcatgcgtgtgtgtgtgttgtgcttttcaggagtggcatgtgactatgctgtttaatcagggctatatttaaaaacaaattttcgagggagtgtttctcacgttaattatgagataaggcctgagtgaagcaaactctgtcgcaaaggccaagtgtcatgcagcaggaagtcctggccatcccttccagccctgcctcagccagcctgccatctctctgtcagcgcataccactgcacaaaggaaatgccctcactcagctacaagtgcctcctgctccgtgcggggcctcagggccccagagccccgcaccagctctgacttctcgtggttcctggggatcttggcatcgtccttaaaaatggcttttgtttgggatcctctgggagccacggtgccaggaccatctacaagagccaaatcaagattgcgtttctcaaagtcctacaggtattactcttttccttttgtagctaggaagaattgtttaactgccttaggccccttgcaaataagcctttgccctatgttgaccttctaactcctaatgcttgttaaattgacaatatattaaataagagccaagaagatgatgtaaaccttgaaataggggtatgtaggtacgtgcagaagttgaaggaagttgactaactttaaaagctaattctgagagttaaatggcaaacttaacaaagcattcatattactgccacctgaaaaacagtgtattaacttgtctaatggcttaatacagtcaactctaaatgttagggaagggttcttgtttgaccaacaaaaaaaacactacattattcttcataagtgtttcagggcacatgcacatgaaaaaatggaaactaatgctgtttcaggtagtaattcagtgttcatcttgcccagcagaattacatgtcatgaattcaaactaaatattttaataatcttttgtttctggaagtcatattaaaaatcttgacctcatgacttcactaaactgtcaatgactgttttacaacaaaatcagcttattttaaccaaataactggaaagaaagaaaacacttaaaaaatattggatttccttcttcatttgagtattctaggtgttaataaagagaagattgattattctttattattgtttagaaagaaaaccttttctgtttttgattgattacaatctatagcactgaaaggtatctatttaatcaatagtaaatagaagtgacattgtttgcaaaattttggatataaggtctttcttatttagaccaaatgcagcacatctggaagctgccaagcctatgtagaaatatatattaacactgaattaaaatgtgttctgatttgcctgcatataaaacattcaaagtttgaattaaaataatttataaggattaattatttgctttagacactaaagaagataatgtccttggaatttttagggaactataaaatcagagaaatcaaatttaaaaattttgtataacaatgcataagcaaactttggcaagaggtaaatataatttgccagctaaaggtataggtattaactccatttatttttatttcaaaataaaataatgatttatttgttatgtttgttacagctataaaatttagttgaaaattttaaattatatgcttcctatgtgctttgcattttgttaaatgtgattctcatgcttattgtatgctaaattgtacatttagaacttaacatcaatgatttgctaacattactgtgcatatttccaacatatggtggcttctaggctctcttcatcactagatctgataacaagctccttaatatcataaatctccagctgctgaataaagtaaaagcaatagcttgattgactaatgaatttgagaaatctcacgaaatgcagagtttaagctcttctgtgtagtttgcaaatatattataaaccttgccttctcaatttggcaaagatatttttattttgaggtgttatggtattgtaacaatttaaagctatatgataaatatattttttcaaggttcctttggtcaagttctgaccctttccaaaatataagcattagcagctaagaatgactttttcatgtacttgaatacctcacatctgtaattttaacaagtttcatttgtaacaagtttaagaggtgagaatgacatctcaaatatccatcatgagtcagtttccttcggaagcttgagaggctcagtccttcctttacttcctcttaatttgaatatacagtttcccacagaataattaatttttttatatgtgccgctttcactgtttggaggttctagtttatctttccagttgcactgcaaactctttgaggttagaagtttccttacatacagcaaaaatgccagtaatgcctatttgataaagtattctgttaccctttcttatttggcatcacccgataatgttttattggcatagccaacttgatatgatcatatctatcataagttgaattgagtggaagggttagggaggtaggaaggcagttggccactggctcttgcatttctgcaggtccctcatgtatccaaaggagattacgcattcagccacgacaatgtactgacaataatgaaaaaaggtacatatcatataacttaaaatttttatcataccataatacctcaaatgcaccatgagtcactctatatatatacagacacatatacacaccacacacaggcacatgcacgcacagttaaatgctataattatcttctgaagagcatagttttattgcatagcattcttggaattaaaggtgttaaactatttgatgtaaacatgtaaaatatctcataatgtcacagccttgtttttgcatttcttattttttaaaaaatatacaaaatccttacgcggtgaaagtaacttaagcttatcttgacctttaagaggctttggatctgattccattattgaagcaactgaaagaactggacattggacaacatttcttcattgaatttctcccttataattttttttatgagcaatattttttatcttgtaaaatcttcaaatgtgcctattgtagtgtcatttttctttggctattgaatggataataatgcatgctactgggggtacacttagctttaactggaatatttttccttggcatggcttttgctgcctggtaatattcaggctaaaggaaagccaggtgtacaagatatgaaattcaattagtgtctgatttgttaaagtaatagcaaatcatatacatttaatgagtgttgactcttgagaaatacaatctgaaacagttttacaatgctcaaaatagatgtgaaagtttttcagctgtgacaattttttatcttatgtgggtaaaatacatttttataagaaaagattaatatatagcttattaagtttgattgaggcagaaagaaggattgaaagagaaaagaagagggagagggaaggaaaggcaggggagaggaggggagcagggccgtggaaggaggagtgaggaagagaaaaagagagaaagcagagggttacataataaggaaggtactttttctctgtgagcccagaagagattgccaaccatgttttcagtaatgggatcagtgttagcattagggcaccacttacaaagatgagtactaattttgagggcaaggtgctgatttatctgcctaggttctggcacacatgtttaaagattcacctaattactttagagcaacgcccctcccaagtattatagagaagaaagaggagaatgatgtgctcaagaaaacaatgtggagaagtttatattggttgtttaaacatagtacctaaaaaaaaaaaatggggaaaaacgatctgggaagtaaagaaagaatcaaggagcaaagatttagcaagcctgtggaccctgacaactccaataagagaacactagggaattttgtgatttaaaatatattattgcttaaaactacagtagtgttcaaggaaactttaaatagaaaattactcttcttgagatgattctgtcttccaaagagaacaaatcacaaggatgttaaaaggaacattttatgtgacaagtttggggtaggtactatgtaaatagaagagaaagtcactcaaggtacatttgaatgtagggcagagattattccatagcattccacaggccagaaacagaaagtgtcttctagttttcttgccctttatagtaataggggtcatgggatagaaattctcagaaaatctccaaatctcatttttgccaattgtttcaacatcttttccttcccagcattttagcagagctgccaaacaggtgattaattaaatacatatgtgcatgcttgtacctcgtgtagaaggtctaatgagtaaatttatttgatatgacatagactgaacagtagaaggaaggattaatgacagtcagatcaacaaacaaaagtacaaatggtatctgggctatgaaaagataaagcaatatttgcccaaacaagaagatctagatatccctaaattacctcctatattattaggaagtaaagaccaaatctacaactttgatctggaaattgtatagtagctgatatgaacagggatcataggagagtgtggtctcatagctactctttgctactaccaaaacctgagtggtagcacatcagtgattgcccaaccaaactgcacaattcccattagaaaaagctgtctcaaacccacatcttagaaaggaagtgaatgccaccagtgaatcaatacactgggatgtaactttctgcataccccaagaatacctcctgttgcatagcactttttagttttcaaagcttttcagatgtaacagatgtgacagctgttgtttttagtgtgccacagctcatctcacttaattctttagggtaagtgaaaaagatgagtgtaattagtatcaaataagagaagaagaattgaaggttcagggactagagaccacacatatatgtggttagaaagtccaaagtaagaacagtagagctagtttgtattggacacttactatgcaccaggaaccattcccaatcccatacatgcattagctcatgcatgtcatcctccaaaacagcctcgggaggtggatctagcattacctttatcttacaaatgaggaaaccaggcagagcaagtttaagaaacctgcacaggtgtgaattctggaagtctgtgttagaaccaggactcctggtccctctcccacctccagcttcctcaccagatcctattatcagcacacaaggaaaaaaattccataatgagaggtattgttctaacagatgtactatcttcctctacttaactctgaatttttctctgaagacagaacaccacgtaatttgttatagaatagggcttagtaatcagttaaaatataaacttgttaaataatatctaaactgtcctctaacctaattgatgttggtttaaagaaatgctaagcaaaagcatcaaaatagaggtatttttatattaaaaagaagaaaaaggaaaatgaatccgttattttatattgtctgcttctgccccctcctggcttttgcttcatgggcttccatctggctcatttcatctggccaaaaacattggtcatgtggttgtattttactgccaaatattactccttggccagctgttcagaggagccagaagattctctgagctagagaggtcaactccatcctgtgtcatgtctatttattctactggcatagtcttgactattaaactaggtttcttaatgatatttcaaattgtgagtaatgttggctaaattgacaaaaagaaattatagacaacatttatatctaagaataacaatactactaacaaccattgcacattgtaggaagaggtagcatggtataggaggagaactttggctctagagccaaacagacccagcttcagtgccaactctgctgctttcttgattgggcaggtttcctaacctctctgagccatttccatgtacataaatagaaaattaaaatatctacttcataaggtcgttgtgcagattagatgaaagcatgtacgtgaatgcaggactacctgccaactctttcatagcattttccaagtcttcactaacatttcacaaattttgtgaagcttcttttgtgaaatacattttcagataaactatcatcattggtaccactcttggtcacagaatagtacaatagagctggcttataaatggttaccttataagcaacttgcacatacaacccaggctcaccttggaaatgtagtgtgcaggaatgattgacagctggctagctctacagccacactgctgctgaggttcacattttcacattatcacttatagctatgagactttgggcaagttacttcatgtgcctcagtttcctcatttgtaaaatggagtattatgaggattaagtgtgttagccatgtaaagtgcctggcacatagacaacactaaaataaatgtcagctattattaataatagaatgtaagctccacatggcagcaatttttgtccttttttccacctttgtatggccagtgcctggaagagtgtgtggtacatattaggtgcttggcgtttgtgtattgaatgaatgaacctattagcaaatgtgttccgattcatggcaagtgtgaggatactctgcttccttttgccacattcatgggaagagggggttagagctgaaggaacctgatggttcatttgttcaaactcatttgtcttacattgaagagcttgaagaccttgaaaggccccagggtcatgcaacttgatagcggcctggtcagagctagaaccctggctctgtgtgcttctgtgaaaatctttgttccaatgtcccacccctcacttcaatacatatgccatctaattcaatgctttcagtaaggcagcaaaatgaatgaatgattcagagcacacttcttgcagacaggagagtgtataagagccataattgggcaatgaccatggaaggacaggtttctgaataagagaaagacttatccaagtaaaattatgttcagacattttacttacaagtctaaaaatcacttgctacaacagctacaatagggtttttgtaaggaagtaccactttgtaaacaacatttttgtagaatgcattatatgcatttttttcaaaattgaaggaaagccccatctcaaacattcaaaagaatctgctcaattatcaatgtagactagaaacagagatagagaggggagatacagtttgagtgttttctgtattatcatgacagcacatggaacaaccacaggcagaaagattacaaactctgcaataaatataaaggtattggttttataaggtggcctgcaggctacggaccagcacagagctctggcaaatgtggaatgccaggagatgtacaaaaaaatcaaggtgacaaaagaagaaaagacactccaaactgccaagggtttataatcatgctgtggatatttctgatcatcagtgtgttaatggttttcactatagttaaaactataccatttttgaatgggtaataggtatgaatatttatgcttaattagtagtttataaaatttatactatttattttcataatgttgattttatgattttcaacgagtgccatttgtccttaagtcatgaagtggatgagcccccatcaagtgattttaagagacagtaccttgactgagcagctggatcaaagcctgtctgatctgggcagagcaaataaggaatacttcttacaaaagaggaagcattcaattctatacactttaccttggtactccttgttctggaggcctcagcttctatcatgttctttgccacagtcatatacccaccttctaccttggctctccctcctcctaacttccattattttttctactttcaaactataattgacaagcctttttaatttcaacaagggtctgaagagaggtgtctgattttccgtaaggctgggttatataagcacacagagttgaatcagagcaaaggaaaaatccattggcaaaggaagaatactatatgctactttaaaacttgtctgaatgtattattttatttacttattttagaggcagggtctcactctgtcatctaggctggagtacagtggcatgatcatcactcattgcagcctcaaactcctaggctcaagggatcctccagccacagcctcctgggtagctaggactacaggtgcaccctaccattcctggcttaaaaaatatatattttagagtctgttttgcccgggtttgtctcaaatacttggcctcaagttatcctcccacctcagcctcctaaagtgctgggattacaggcatgagccatggcacatggctcaaattatataattcattagctggtaatagtgtaaatttggaagagaaaaactaaaatgataaagaggaaagatggattgtgaatagagtaaatatatattactgtaattatgttaagccaatcaaatgcaaaggacagttcaaaggggacaagtatgtaagccacattccaaaaaaaaaaaaaaaaaagctttgaagtgaagctttaaaaagataagctttgtgttgagctaaagaaataaactctataaaaacaaaaccctaaaattgttatgacaatgaattaaacattcaaaaatgaacagaacagaatgtaaaagattattccttcaggtggtaaatgttcacaaccagctctctatgggggaggggaagggcactatttgtagtatttgctgatttctgtgccaaaaaattctctcacctgcccatttcaaacagcagaggtcactaaatgtggagttggcaagagatacatagacatagtactctatacagtgtttctatcatatagatacagtagatataagttgccccaaaaacataataatacaaaatgtagccaaatcattcagaagttatgagttttgaatacttatttccattgtttttaatataatttgtttaattatagttaaaaatttttatgtaatttaatttttaataactgttgggtattaacaactgacttataaatactcctaaaaatgtaacagaatgtagtgagggacaaaatggatgcggtctctgctttcatcaagtttacattctggtagagaaagacagaaaataaacaagttaacaataaataaaataaatagagactgagatgagaggttctgcttggggaagccagggaaacctttacaaagaaattgataatttatttgcatataagttcaagcatatccattccatacatctgtgagtacatttgtagttctaggcctgaaactcagaactgcacaaggtcaatggaaccatataaatattgacctcattactgacttgttttcagtctccagtctcttgagtgaatttacctttgcttctttgttattataaaaatacagtgagggaaagtaaaacaaggaggaagatgaaaagaagatgtagggggaagaggagcagtttacaatatactttctattacattgtttcacactatctcaaaactttttatacgtagaaaatactaaagcaaagaaaaatggaagttaaaaatcggtagcagtagtaatagtcctacagtaggaaccttgttttgtttgaaatatgtgtctgtgtctgcctacaaaacataaacatcttaagctaagaataactgtgagattaattttttattttcaaagaaataatacaaattttaaatcttgcattaaaaggaaagctagctggacgaaacttttctgacacacagattttgagaatagcacccataaatatgcttccaatgcttgtcacttgatccctttttggcaattaacttgcctttaattgatttgtggattacccactggaagttgctatggataaaggaatgtaatggcagagtttgtttatgtagggtaacaaaatagactggctgggaggagggatttaactgcaaaatatccttgattttcaggaatttttcttttcacataatggcagtgtttagataaagaatggaaagttaatgaatcagatttgtgttcccatccaaagggaagatttatgtcctgtttaagaatcacattaatttgatgacgttagtacattctctagtgaaagagtggccactttagtggaggaaaaaaacaagcaacaaaactccttctgccatcttcaggttgtacctgacgaaaagcttttatttgtgggttctatgaagtatcactgccctgatctcagatgaactaaaagatgaaaacatttcatcgctcaaataattgtttatctcacatcttactggttctagaaaaggactatatattttccctcctaactttcctcagtttcttggtataaagttcaaaatgctttgagtagagttgttcaggaggtcctcagtggcactgccactcactggttgggacgtttttgttctctgtcctcctgtgtggaagatgacaaggacggctttgtgcaacttctgttgtatgcgctgcttttcaaccccttggatgagatactcatacaaggaacgtcaggtttttttcctaaagcaaatccgtgtaaactgagacaacataaaccttagggagatctgacacaccaaaatgccaagaaagggaaagaagaaattattatcggtgggggaaacaaattatcctgtattttggagtgaatttaaaaggcttattgtttgttttagcactacatgacttaaaaaaaaaagtctcgcagtcttgccttcctcatgttggttaaaatggaaaggattctctttctttgctatttatagataacccttagcactctgcaaggatctatttggtataaaatgatgggtgtgaatgtgccagtaagagagaaaaaaatgcttagccatatttactcatataaccaacatctaggtcaaaatcaaaatattaccagctcccaaggggacccctttattcttctttccagtcactatgcacccgaagataaccactaactgacttccaatagcatagatttgactacttttgaattttatatgaatgaaattatacaatataaactcttattttatttcagtcaatattgtgtttatgggattcattcatagtgttttgtgcattctttattctcattttgttagtattgcaccaaatgaatatgctacaatttacttattctagtgttgatggatagttaagtattccagttttaggccattatgaattagagccattatgaacattattggatatatcacttagtaaacaaatgtacatgtagtgttgcagtgttttgtgcatacacgtaggttgggtatatcccaagaggtaggatttctgggtcataggttatgcctttgtctttagatattgccaaatgtgtttctatactggttgccacatttatgtcgcccccaaagtgatgtttcagttctctgcattcttaccaaagtataggtcatccattttcagtgatggcatcttaaaaaatgtttgcctgtaataacaatgtcatcatgccttttatttatgcagttgagtcttttaatctttaggacctgtttttccaggaatagtgtgggtaacagtgagccattcacactctgtctgtttctcctcatgatgaatactatgtaactgtgaattaagtgactaaaataagaaacgatctgatatgcagaaatagagttttccctgtttgatccatatgcagcttaaatatgtgatgttattctacattttatccagattcatttttcaaaccaatagtaatcattgttagcaaaaaccaataaataatcttttattctgttttaaaatttccatgtcgtactttgagttcttgctatatatcccgtgctcactttaaatcaggttttccttcccgtacattatttcttggaaaatatgttttggacttttcctaaaccaccttaacctgttgaaaaacactagtaaatgcataggcagtgtaagtcacgctaaaataaatgtgtattgctttttcaagattttgtttacccatgcatttaaagaaggtttttttccctttattttctttcttttttgtcattatagtcattatgtctttttaatgttaagattccggtaatatatattcctcatttttatgtcatctccaaagctccccataactgattgatgatatcaatccggcttctggcatataaagtttgttgacctggttcagtttgtaccatgtcaaaatgtgatcattaattattagatgatgtcaggaaaaatttagtatgtgtgataactgtgggtcccatttcttaaagctttcaaaatccaatcttaaggctctctactttgtggcatatgagggaacataagtaaacattagagcaatatcaaacgtattctaagggtttcatgatgtgaaacaatatatcactttattaccagacagatacttcacatcgtgaaatttgaaaaagcatacgaggtggggcacagtggtttaccctataatcctagtgctttgggagggtgaggtgggaggatcgcctgagtccaagagtttgacaccagcctgtgctacagagtgagaccccatttctacaaaaaatttaaaaattagtagggtgtgatggtgcctgcctgtagtctcagctactctgggggctgagggaggattgcttgagcctgggaggtcaaggctgcagtgaatgtgatcacaggagtgtactccagcctgggcaacagagtgagacctcatctctgaaaaaaagaaaaagtatgtaatttttacgtaagagtcactcgattcatatcatgaagcttgtgctaaaaatggaatcattcagtgatcatgggctgcttttcaagcatttttcgctcaccctttaccattatgacagtaaactttggggaaaggggaaggcatgggccaatacatcttttagtatttcttggttatactaagaacaactgaggaactgctaaggaacaactacatagataaaaagtatttttattataacccttgtgaaaaacctcttcccccataaaacgtttagtatcttgtatgaaggcataatgtacttttaaatattcaaatccaattccagatttcatttatgtgctatgtactgtgtaatccaccacgcaaaatgtaatttcttgcttttaatataaattttcattattatcataaatgaagtctcagaccacaacattttgttaggttgcattcaaatggtaatcataatatgacctataccagtttttgcatggaagggcagcagccggctgaactagatttccacttttgtcttggctcattaaacaacaatggacaagttaccttaacttcatgggtcctcaaccttctcattcgaaattgagtgtatggactgtatattacaatatccttttaagcttacagaaataacattatggaggtatgagaaaattgtaaatgatccaagatatgtgcctaaatatttcttcatacatcaagcatgcattcatgaaatcaacaccaagcccaggaaatatcaaagaatagctcaatgtccctgtgaacttatatccaattcaataattcatccaacaaatgtatattgagtatataatctgctagacttatgaagccttaaactttatgctgtacattctgatatatgttgttttaaccaggggttggtcagctttcaaaagtgacccttttgctaacattgttcttctggctgaaagctagtaagtataagcaaaaggagagatgtatatgatctcacttctatgtggaatctaaaaaagtcaaactcacagaggcagataatagaagggggttaccagggggtgatgggaacaggagggattggggaaatggtggtcagaggatataaaatttcagttagacaagaggaataagttcaagagatctactgtacaacatggtgactatcattaagaacaatgtattgtaaaccaaatattatatgtggtcacttataagtgtgacctaaataatgagaccacatggatacataggggggaacaacagacacaggagcataccagagaggggagggtgggagaagggagagaatcaggaaaaataactaatggatactaggcttaatacccccatgacacgaatttaccattgtaacaaacctgcacatatatccctgaactttaaataataacaaaaccaaaaaaaaaaaagaaaatttctaagagagtagattttaaatgttctcaccacaaaaaagtatgtgagttaatgcatatgttaattagcttgatttagctcttccgtaatgtgtacgtatttcagaacatcatcttgcgcactataaatgtatgcaatgtttgtcagttaaatatttttaaatgaattttttgaaaagaggaggggtgtgaaaatgaagactacttctgactttatattttatattctggggttacaagaatgagacctccctgatgcctacacacaaatggattaatgtgaaactgaaggtttacttgcccagtttacttgcccatgtttacttgcccagttgattcagctggtttatgtataattgtcaacaatttaaactctgtcccattcctccccaaaatttatgtactttaaaaatagatctcatcatttcaacatttcaatttatatatgagagaaataaaaaggactagtaaaaattatatgaagaagcaactccaaatatggtaatttatggttcaaaggagataggtaattgtcttctctcaagagccactagaccacaaaatatcaacatcaaagatgaatgcaagcgctaggggaaacgatacagatcagaggcaccatgtgttgtgcattctggtatttgtcagagataaggaatgaagctgaattttttcatggatttgtcttgaaggaaaataaaatgagaggttatgctaagtataaaactatctttacaaagttcctttccgttaagaccttcaaagatatgtaaaatcataatttgagaattgcttttaaggacctaattcaggttagctaacaaatcattatctaaaaagagagtgttagaatactatgcatttaaagtgagtagttcacttcatgattgagcagaaattcctgagttcaaatcatggctcttccacttgcagcttgtatgacatttatgaaattccttaagtgtgctctgtttcaggtgcctctgcgcctacatcattagagttattcaagtattaaatgagataatacatatatagccgttaaactagcgcctggcatagagtaaacagtcagctcacatcagctagcgttattcacaagaataggctatacatttctttccatcaaagataagtgcaagtttgaatagaaaaattaatttatgaaacaagactgattttatgcttttctatagtgcccatgattcaaaggaaaagaaggaaataatcaccaaccaagtgaccctgtaaaatagataggagttacgccatgcatacatacatgcatatatatgtattttggatatatatggatatattatgtgtgtgtttgcatacgcattatatatacatacatacctttgccaagaaaattggatgtctcatatctaaaaaactttcagtgttaagaactagccaagtgtcaagtacacaatttgtattcaacatatatttacagaatttaactttgtaaaaatttcaaatcactgttattgcttttcctacttgtaaaacaattacaaaaatcccttggcttttgtggtgtggactattataagggactctgatgcttcatgacagggagtaatttgatccaaagtacaacggagctctcgtgtggatttaagttaccaaactattgaagggacccatgcaccaccaagtattcaaatcacaatataatttcattattctctaccctcccttgcaaatgtaataactctgaactgataaacacattgtacctgtgtagaaaaatgccacccagaaggaagctgactgctaatctaggcctgtgctgtccaacaagagagctagtagccatagagcacttgagctgtggctaatccaaatcagatgtgctggtaatgtaacatgcacaaaggatttcaaataatagtgtgaaaaaaagtaaaaattttctcatttgtaattttcataatgattacatgtttaaatactaatactgtgtatagggttaaataaaacatatttaaattaatttcacctggttgtatctaagtgtccatcagccaattaacggataaagaaaatatggtacatacacacaatggagtactattcagccacaaaaaggaatgagatcctgtcatctgcaacaatatggatggaactggaggtcattatattaagtgaaataagccacacacagaaagacaaactttgtatgttctcatttgtgggaggtaaaaatgaagacaattgaactcatggagatagagtggaaagatggttatcagaacctaggaagggtagtgagtggcaggggtgtgggagtggagatggttaatgggtacaaaaatatatttagatagaatgattaagatctagtatttgatagcacaaaagactgattgcagtcacaataatttattgtacattttttaattaaagagtataattggattgtttgtaacacaaaggataaattattgaggtgatggatacctcatttaccctgatgtgattattaggcattgtatgccttatatcaaaatatctcatgtaccccataaatatacctactatgtacccacaaaagtaaaaagtaaatacattaatttcacctggttgtaaaaataactttttgtaatatggctttttaaaaatttaaaattacatgttgtggccatcattcatggttcacattatgtttctactgaacagcgttgatctagacagtagacactacgcaaaaacagctaagaaaattattaattctttaaaaggataaaatttaaagtgataaatgagatcaaattttatgagcaagtccatcgtagttcactctgtgcttgtttctagggaaaaaaaattggaactttctgtagagtgtgccagtcaatgcaaaagtgctcatcaagagagaattaaaacattagcaaataggggctgttgatgaaaatgagattccagagagggtgagaagactgaacacattcctgtaaagcaacagggattaatgcaccaatgagaattgcttttttttttttaaacaaaacaaaacaaaacaacaaaaaaacccactaaatttttctaggggaaaagtaaatgctagagtgatattagtgaattaggggatttgtgaagatgcatttgaatgtcaagaatataatgtagttttcttagtatttttgaattcagtgaccttttgttaacctcaagagactgaggctaagacaccaacatttaccatgtgcttcaatcattctctcaaggacgcacagctcctctgagctgtaataggaattcaggtctgtgtgactcctgagcccacatgaccgaacgtgtgcccatggaacactggtccctgcaactgctctgcaaataatggttctatacttaaatcattttaagaaatgttgcatgtatcgttaccgtcttaaacatgattcattgatttgcatattaaaggcactgagaattgctaaaaaactgtttaactttttaaaatctttttctcaaacttcttttgccacagaacacctcctcccctgcacatgcatctatatgccatttatcaccagttgcatgctgaaactaaccttagacagaatgctatttggaaatgctgagatgccttaaattgccttctatcatctctcattattagttactaaggaaaatggctttgagaaaatataaaatatttcaggaaaatatgtaatttgatgctcagataactcactttttgctacatcagaaaaagcaaaactagaatttaaaaataaacttggatgcatgtcttggttattcttatattcatagtgtgtgatccaaagggagtcaaagaaatctgtagcgaggctgctcacagtctaggtctctttttgtgtaggacaaaggtagggcttggcttctagttgaagctacagttctgtaggacttgggatttggaaaagtaatgacaagataaataagttatcaccatcagagacctaaatggttgcaaatttggcactggttacataatgaacaaaagtttcataacatatttcataagatattttcataacatatgtcttacaattactttttttattttctgaggttttttctctaaattatgctaaaaatgtcatcgagaagcataaaaacagactttcattaatagttgctatagcagtgggaaatttttgtaggaatttaagtaaaaaagcaagttatttagcagttttgttcaaattagacatttctgccatcagcctgccccctgggaacttggaaagtgcatacttgctcttgagttctgctagtgccctaaccacacgcctttcatgtctaccatacttcgatgatcttggattcaaatatgatcctctgccttcctcacagaaagaaacaatttagggacatggacttaatggtaatgactttcaaaagctaatgacgtgcagtctttcggcactgcctagccgaacactctttagacaacctgctgctttagactggacatgcacatgattcctaagatacactaaacaagaatatgagatgctgagtccattgtttcctgtgcaaaattcagttcaccaagaatactattttcaccaagaaagccatagactgtgtgtaggtaaagaacttttgcgctaatgaaacttgttattggctgggactaggggcctaaatactagtttgagattctgtttctgctgtgccatatagcatgagataccacttttgcctctataaagcagggctatggttatctttccttattacctcagttgattgttggctgtgagaaccaagtaagatatgcttcatggaataacagaagaatgcaagatattatcacgggaggcaacatttttgggatatcacatattagtggaaacttaaagaatatttgagaggttatctttgacatttacataaaaccatgtatgaaacaagtagttcttgtgtttttttaacctatgaactttttcaagtgttttctccacaacattcctctcttctaccaaagaaaatcagtttacagtcatgtgttttgtaaaagcctaaatgggaatgaaggtggttagtaagagggttcacaagatggagaggctcccatgacatttgtaggtttaatctcgtgccccatgacctcttaaaatgtccccatgcccattcagaataccccaattcacttcaaaggcaaaaacaacgtgacattgtgaaatcataccggatgttctagtagaactgtgttctggtcctattgagttcacccaggagaggcatcaaactctgcaatcagaacatatcaacacatggcctattagctgattctgccacttggtagctgcatattctctctctgtttagtgtccttatctgtaaattgaaataataataatagctcataaggctttgtggggattaagtgagataatcatgtacagtgcccagcacagtgtctactgcatggtaaatactgcaaaaatgttagctgttgactgctcctatttatgaccttcattattaaaaaggggaacttaggctgacgcaggagaatggcgtgaaccccgggggacggagcctgcagtgagccgagatcacaccactgccctccagcctgggcgacagcgagactccgtgtcaaaaaaaaaaaaaaggtgggggggggggaacttatgaatgcctttcacttataccagcatcattaaaaatttaagttttttaagaaccatgaaaagctaaccattgacaatttaagaagcatgcaagcttggtttacaaaagaactggacaagctcagaatgggctagttcagtggagtgactgctgcaggagctcaggttttgagaccttcctgtcttcttccttcatccttctcctctttttgtgttctctccacacacttttcctcatcaaagccaaaacctttgttcttgctatattctctttttagagcctgctcacagtaaaattttaaaaaaatgaagaagtgctgaaagtgtagataagcaattagacatgagttaatgttttttatttgcaagagcatttgcattctaatatgaactgaacattgagtaaatagattcctgactccctaacagggctatgtcttgtgtcaggaagccagcgcactgggcttcttggtaggcaggagacccaagtcatcatctgctactaaggctgggtcttggaagatggagaaggccgtagaagaaaggaaagccaaaaaaagaaaggaatgagattttgatatattaattagctcataccataagcctggacttttgctaggcattttccatggtaatttggttatacctcaaaacaattctcaacattattatcactgccaccacttctgttagcagctgtgagaacagaggtcatgtgagtaagcagtttgctaagggttgcatagcttaaaaagtagtcaataagctaaagtttgaaccctgagatgcctggccttcacagctaaacttttattaattacacctgcttctaacaacaacaaccatggctaaagtttcattaacctaccagtttctaacaacattaacaaaaacattttcaaaaatataataatagtcatcaataggaataaagggaaacaatccaaaaatagctctgttgaggttactgatggatggggacaggaaagtacaaaattttttctacgaaagtttccctttgaggatcactttccttggctgtcttgccttgtgaaattataccttccctaatggcttggagctgattgtgcccttctttctgtcaaggacagcttaaacttcatggaatagtttatttgaagcttgtgggtaccaattccaggcagcaagatactactttcagagattcaattaacttccttcagagtcacagcaaaaagcgatagagctaaattgattaccttgaagtgccttaaccgttttgctgctgttgttacttcttgagccaatttattctcccagcaatgtcactgttactgaagttggtctgttctttattctcagtttatgaataggaatcatctgaatatagttatagacctctagtctagatcattttttgcaaaattacaaagatgggaaaatttccaagccatagttattccaaatggctgggagtgccttaggaacttatttctggagtcttttgaactatttatattattgatatgaacaatgcccctgattgttagttagcaatctattcattgatagggacatgaaaggcagtctgctgccatctagctttttagtttctatctttaggaattttccggtcctttcacagaaagacactttttaaaggagcaattcttacttcatccctgagagggagacacttatgaaggtactgcagaatcttaaaaaaaaagtcttcatcattcttttacttctttttgcctttaagttggtcttaaatgggtaaaagtgataaatgtaggttgtgtagttcaaatccattgcagtgactaagcagtgaccacccataggggcaaaaactatgtatttttagaggcaaagattgataaccacagccatgaccctgagcaagactgtgaaatagatgcagttctttgccatcctcccttttcctgagttatgggcactttctgccttcatagctgtttcctctgcaaaatggagattttactgtcagaagtctcctattgctattgcttcttggagttggttcccatgctctgggcacaggaaagcaatctgagatcttcactactaatatttattgagcacctatactatgccaggactggactgtgctctgaggtcacagtggtaaacataccgacatggttcctgctgtcatgagccttccaaaggaatagcgaagaaaaacattaaacatatcagcccatgattaaatgcataattagataaaatgcattgaagaagtaaagatcccaggaaaggagagaaccaattaatatgatggatgggaaatcaaggctgctggaaggaagtagtgtataagctgaaaaatgaggagtgaataggaattagccaagtgaaaagcagaggcaaatgggtttcaggaaaaggaaaaacatatgtaccagtaacatttcaagaagaaatgggaaggattagatgatttctgttattcttattaggttgatctcttccatggaagagacacacagaatgtaattaatttatagaatataaaaatgatttttttttttaggaatggggaggtgaggagaagacccgcttcaagttctgttccaatattaatatggttttgctttctctacaaacctaagtaaaacaatggtggtaccaagggttggttgggaggcactagttttcccagtgtacatactcacaactaacataaaagctaaatacgtataatcaacatgcttacactacaaacacaacttcaaataaaattcactagatcaaccgggcacagtgcctcacacctgtaatcctagcactttgggaggctgaggcgggcagatcacctgaggtcaggagtttgagaccagcctgaccaaggtggtgaaaccccatctctacaaaaatacaaaaattagccaggcataatggcaggttcctgtagtcccagctactagggaggctgaggcaggaaaattgcttgaactcaggaggcagaggttgcagtgagccaagatcatgccattgcactccagcctgggtgacagagctaggctccatctccaaaaaaaaaaaaaaaaaaaaaaaaaaactccactggatcctctcttccaacttttttcccctaatttcttcccttagcactgatattatcaaacaagtggccaatcctataaaggctatcagactccaatttaaaaaaactattaaatttaaaaacactcagagatataatgattgtatgccttttatgaggaaacttagtacctaaaagaaaaccctataacttaacattaagcatatgaaggtagctattattcaaataagtagcagtaaagacttttcagctttggatcctcataaacaagacctgcaggtttaaagatttgcatacatcttttaacaatgcatcatttttattatagtatattatatactattttatatttacttaatgagattactgacctgggtttcaagatatgtatgaaatataattaggatatgaaaattaaagataaattatccccaccagaaataatcttagcaggttatttactaaagaatcttaaatccagcagatcaagaaaaactccccaaggagtctttaattagaactctttaggatggaatcaaaatctctccataaaaaatgaatcttgccttaggctacataaattacaaaatctgaagccctttaagcagcattaaaactgctgattttaattgctctgataatgaactggagagagacacactaagcttcctggatttctgttggaaatgaatgggattcttgccaactatggatcacagttatgaggtattctgcacagggaaaatcaaaagaaagcagatggaccttgacatgctatgccatcctatgccttcttccttcccaagaagcatgttacaataactttaagtgaaggttgtcacaactttaagtgaaaagtctcccctttctgtctaatttttaatgtaacttcccccttctcgatatatccagaaaatagttaataacaatccctgagggaaaagaaaaatgctgcccttcatattaaaaaaaagaggataacagagatccccttagtggtgagtgatttatagtgaaaacagccaactcattctcttttgcctccttttgacctagagaactggattcgcggatttgtaactggattttgattatagagtatgttctatggctacaaaagagttttcctttgaggaaaactcaaactgccaacagatatgcttggtatatcagttttcaatgctttcaattgtaaataacagaaacctggactcacaatagcttgaacaaataggaattacttttaagtaggtggcaccggaggtgtttcagctgttgcatgatgttatcaccatttgcaaagaggcagcatctccacaattttcttggcctgttcctcttgatggcaaaaggctactgcacgtccagatgatcatgtctgtgtcacagatagtgagagggaaggaggaaggatgagagaggatggccagctaaagttgtatctaccccacttataagaaacacaaagcccttccccagagcttacagccctttagccagaactatgacacatggtcatcttgagtgcagaaagatggaagttaacatttggttttctggtctttttaataaagatagcaaggatgaagaagtttggaaaagactgtgggctagccaatcaaattgtcgaccacatttggcctgtattaatgtatagtttttaaagcctaatgtcaatttgttaaggtgtcttaaggacaggaaaatggagaagaactaagattttttatatcaaatacagagtaaatcttggaaagggtgaattagagtggaaaataaactagacattatctaagagtgccttgaagccagatcttgcaaaacattaggcaagcatgtcactcataatggaccccagggctttccatctcataatgtggataaaaataacagtgtttctctcagtttttaaaaatgtcaccaaaaattcaataaagtatatacatacatattgtaattgtttaaagtaaaaattttatgctgttttgggaagaaaaataaccaaaaaaaaccatcactgaccattggtcatcaaaatctgatttatgccatgtttacaagataaaaacaagaataaataataattgtttgaaatattttcatcatattgcctctgaaatgattgatgtcatactgcctggatttagtcaactcagtgaatgatttatcagtagccatgctctaaggagctctctattcatagatacttatgatttggtgaactgggaaacccacagagaaaggtgaatgaaataggagagccaggtaaatgggccatggatctaagaaccaggaatcatgattgtttggaagaacatatctcagactgagaaaagctggcgctaaagtaagctagcatttgattagaatgttgaaggataatttcattcttggagacagaaaacctaagtagaagcaaaagaagtaggaaatagaagcctgtgtttgagagattcagagtgactgtgttttattagaattgcaagaaagggaacttgaaaacataaatttaacatggggcaacaggccttggattctgaacagagggactttgtttaaggatggctctgtggctgtggaacagtttttctatagattatcaaaatgattctggaaaagaaatgtcattctggactgagagcacataccatagggaaaacatgaggcttatgggctgaattgtgtcacacccaaagtcatatgctgaagtcctaacctaggacctcagaatgtggctttatttgaagattgagcctgtaaataggtgattttgataaaatgagatcattagggtagacccgaatccaacaaggctggtgtctttataagaaaaggagattaagatgcacgcgcacacgcagagaagactacgtggagatgaggagaagatggccatctacaagccaagaggagaggtctcccgaagaaaccaaccccactgacatcttgacctcagtcctctggcctccggaactgttttaaaacataagtttctattgttaaagccacctaagtctgtggtattttgtaatggcagccctagggaaaaactacaatgagcaagtattatttgtattttaagaaataatattataaactaaattcatggaggggaaaatagaaaaagaggtcatttctgaaaacattgtataggtgtaacatagttgacactatcaactactacaatgggatcaggagacagagggtcagtgataacggagctctcaagactggaaactgggcgatccagaaggacaggcggttgatgaaagaaaatgatgagtgtggttgaggctgcgtttcccttgaggaggtgctggtgctcagggtagaggcatccatcacgatgtcagaaatgtgtgtcagacacgaaggcaggaatgaggctgtcgaggaagccatggcaacataaacagagaagtgccacagcgagacaaccagccaatgagttgtgtagtttcttgtaagtagctgaaacaacataaccaaattgttcaatttagtctacatatgaaatttcaatgtcagagaaaggcctttaatctcaaaacgaaataaactaaaagacattattttcctgacagctaagtcttaaaatttcttttgagaaataaaaaaaatggttttctcttttaacatagaggcaaaccagtaagtcagatacttcaggggaaggtagcttggtgatttgaatgtatgtgagtgtgaatacgtgagattagaatcttacctgagaacaaattttcatgagcatcattggagagtgggagagcatgaagacttttacccttctctctgcaggagagaattgtgcaggaggaggtggggagaatgccaccaagaacaggttgcctggggctagtttagcgatggggtccaaacgatctcactaatgtgaaaggatcatagttaccttaccaagggaaagttggcttcaattatatatttcacttctgtaccaggttttgcttaaatgctactctttggagaatatcaagaaatttagatgagtttaccaaatccaagattgtgttccctgcttttaactcttgttactgaaatagccccctgatccccaagagtaatgcttgactgaggtgtttgcatgaattgtttatatcattcattaattaacgtgatgaacatattaaagataggactcccagttttcatcccaagggcttacatataatagtaacaacctttagaaaagtactgcattgtttatttatagaatggctttgactcacttaataatgctccataattaatttgtaaattactttttgactttgcacaattataatttaatgtcatatatctgcaaaagaaaacacttttatgttgctaatattaatttcccttcataaatttgagactgttttgactatagataaatgtaaaatgtcaatgtggtgagaatgactcagcttctcagatattcatttattctataaatatttttgaatacctactatgtttcaggcactgatctaagtgttgaataagtagacaaggacagcctgccttcaggttttttacattcaaataacacaagatgatgaagaaatttttaaaataatctggttccatttggcagataatatagatatgctcagttttataaattttgatacctaaagtattgtgataatccaaatcatgacctttagacattacactatgcttattgattgaaggttgacatatgtttagcatattctcttataatgtatttaaggacttcagtgagtagacaaaagaagtaaacttgatcagacaacatgatttctgagaacagactcttcctggagcaagcattctggttagattttacagggcttcaataaaaaggtatatgtttatgctttttgctagttgggggtttcctagcaaatgattccatgaaaacatttgcagggaattcccatctgttctatatttccctgatttgggggctctgaatcaataatgctgatgtaacagttggcaaattagataagaacagcccgagacttccttttccattaggtgtagtctcatggaaaatcacccttgaatccatcaatggaatgaagcaactgggtggagcctatgggaaaatcctggaggaagtccccaactagtcagcctcccctctctgccttgcactcttggattccttagcgaaacatccaaaatggccttcttgcaaggaggatgcagtcggtgatccacatactgaccaacagctgtgtgtgaaaggcaccgtgcccaccacaacaaaggggcagtgaggtctgctgagcagatgagtcgcttttctggacccttccaggcttgcagttggctcagatgaaaagctcaggcttatgagctgccagaaagtatttggcaaaaagcccaccttttttctcaagtacacgtattcaattgacttgattcctcagagagatttgtgagggtgaaagcaagttcattgtccacttttaatgaccctcaacttctaatgaggtaatatatgtgaaagtgatttttttaaatgcaatgcaaatacagggtgtttttagtcattatttcagtacctgaggaaaatgtaaaaacacaaagccacacatgtaccaaggcactacatgagtgtacttggtttcaccatctaatttagccctctgaagtgtagagtccatcgaggctattattttgtggattgtgtactgaagttgcttttctttgttctcccaacatacacttgtgacacttccaacctctgatatgtatatgttaaatacaggctgtttttcaaacaagataaatcaaatgctagctaggaagtgtgcctagagtttaaagcattctagaatgtactcccatataacagctatacttatataatacctacattgtgccagtgtttcatatatgtgaagtgctttaatcctcacaacaaacataggagggatgtagtattattaccccctttttacagatgtgaaaactgcagtacacaaggtgaagtgagaggccccaaatcacacagctagtaaatggcagtgtcagacctcaaattccactagtctgtcttcagagtctatataattaaccactgctccctgtgcttttaaaggttagtttaatggatattgtgctatttctaataaaaggatataatttttgttatatatttttcttcttagtcttcacttttggatcttggaccacatgtgctattatcatattttagctcataagagacttctctgataattttgtataaaatacacttatagaacatttgtatcttgtaaatgtaatttttcttaccattatctcatttgatcccccttatccacctctagaatatacagagctttatcctcatttttcagacgaagaaatggaccaaagaagactaaacaatttgttcaactccatatcaccagtttgtagcagttctgtgactagaaaccaaatttcctggctcttagtcctacattctttctagtatttcaaatcatcttttcatttctctcccttatgcttttggaaagaaaattgagaagaacgttaagaaccccagtaaaattggagaggcatttcttgagaaatatttaaaataatttaagaagtcttcacaaaagtagtaggcaaaaatgtgttacattaacaacggatctcattaagtcagtgcatacagctaggttctggtttattaattttcaattttttcatttttgggcctgcctaatctgaacactttgcagtacaattctgagtgctctcatgctttgtgctatcgctttcttaaggtagctcatttgcacttgttcatcatcctgttccttcccccagtctcctgggctctgttgctaattattgacccaggaaagcctcagaaggggccaaggcagctaaaattggagtgctctttacttagacttataatgcattttccatttttcagaaagagtaaagcacttttagctaccagatccagagaccattcagttatatgggcacttgagtttctgctaaagaatcacaactcaatttaattttttttttttttggtatttcattcacagccagtctggagtgtgtgtgtgtgtgtgtgtgtgtgtgtgtgtatttctgtttctgtattaacatatgagacagcagaataataatgtgtccattcattccatagatatttctcaaagagttgccaagaataaagaatagtgctaaaaaaaggtggaagatggttaggtgtaaaattacctcctctcacaggacctggcacatgacaaatgcttcagaaatatttatcaaactgaaatgagctattacatgaattgtattctctggctttggaatctattggggaaatgatgaagtcattaaatatatgcgaattggaaaggaatttaggaatcatcttatgcagcccttttactttaaagatgaagcaatggaaatgcaagaaagttatgtgtcttttccaagcaagatcacacatctatttcgaaataatatgctttttttcattgtaacatgtgttttagagattacacatatgtcaatgtctgtagtgcagggcataatgtgaggagagctgttgaatgctttagaacagtgctacccagtggaaatataatgcacaccccatatacaattttagatttttattaatagccagatttttaaaagtttaaaagtcagtgaaattatttgtttcatactaagtcttcaaaatccagagtgtgtattatatttttgacacatctcaatttggactagccatattttaagtatttaatagttatatgtgtcttggggggggctactctatagactatatggctccagaatcacagagagggaaaaataataatgtatttttaaagctgcagtatttttaccatgggttatatttttaagtttgattgtaacacaaaagtacaaaaatgaaacaaactgactcaacacattttttttcttttttttattattatactttaagttttagggtacatgtgcacaacgtgcaggtttgttacatatgtatacatgtgccatattggtgtgctgcacccattaactcgtcatctagcattaggtatatctcctaatgctatcccttccccctcctcccaccccacaacagtccccggtgtgtgatgttccccttcctgtgtccatgtgttctcattgttcaattcccacctatgagtgagaacatgcggtgtttggttttctgtccttgcgatagtttgctgagaatgatagtttccagcttcatccatgtccctacaaaggacatgaactcatcattttttatggctgcatagcattccatggtgtatatgtgccacattttcttaatctagtttatcattgtgactcaacacatttaaaaaaaaaatctagagtagacctatacaatttgacagattgcatcaatagttacaattttagacacccctacccctccacacatagaaattagtgaataagcagactgtcaatagtactggctcaaataattctacatacaagttctaccaaactttcaagggaggggtaacttctaccttatacgaattatctcattttacaagtaactataagtatacaataagttccatttgcagcactataggagcttgaactgtctgccaatttttaaagaatatgctcaagcaataatcttggttatccatattatcttacatttccttatgaatattgagagttctgttattgataaatacaaaggtgtcactgtttaatacactactgtgtaggtccttttgctatgcatttactatttaaagcgtaaaaacgtaggtagcaagaagatttatctttctggctattcttgaaattcctgtttctaacaagatattctgcagaagcaaagatactactgcattgttcaatgtttccacaaaaggttaatataattgtgggttcagctatcaccttgaccttttcttggatctttgatcagagtttaggtaaatatgttgttaggtttcccccttttaagttcctgagcttttgaagtaaaaccagagctgagataggaaagtgaacagcaaggggcagagcacagcagaaactgaattaggtcacttttctagaggcttctgaatttggtacagtaggatttctgtgatcatcttaaacctagcttttcaaaaggctattactgttccattttattctctggcccagaaaataaatcagaagacttctacatccttttcctcaaaagctgattctgattctctatatgatgccacattaataaagttttccctattaattaccatgatgccatgcagccttctaagatgttttctttagttcttagttcctttgcagttccatctccaagcataaattctcattaataatcagtacagtgaggaagatagacatgtgtcagtcagtgagaatgcttgcagctgtaactgccagaaagttgtaacttaactggcttaaaccaaagccatcctgaggtgggaggctccaagtcactcagtgacattatcaaaggcggcctgagtctttttcatctttctcttctgccagcctcaagtgttggtgagttttctggtttgttcctgtaaactcgagatgtctgtcacaggtccaactattacatgcagataactatggccagtcagaaaagaggatcttctttttacgtcttcttttaagaaagaaaaaaaatcatttccagatggtctccccttgtcccacttcccttcaatgtcttattggccaaaatggtttcacatgccgatgtcttaacaaatcactgccttggaaatcgtactttcatgattagctgagacaatcaggtttccctcatggtggctggggctgaggcccacctccctgtaagtatgtggctgcaagggtaggtggatatttgaatttcactgggggcctagtaggaaggaatggctcttgggtaggctacccatagagtcaactacaagtaaatcagaaactatagtatcataagtgctacagggaaacatgtaaatgcaggatgctgtaggaacacgcaagaagggcccctggccatgcttgcttgagcaagagggagagaggaatgccagagtgggcttttaatgaaaatgttatctgatctgagatataaagctcaagaggagatagccaaggaaagggtggtggaaggagagagagggtatcaggtagacacagtatcatgtgcaaatgactgggaataagataaaatgtggtaggtttggggagatgcagaaaaattagttggcctaaggtatagagcataagttggggagtcagtcagaaatagggctatagaggtaaactgtagatcataaaagatctgataagtcacatagaaatttctactttattctgctgcagtggggagccagtgaaatattttaagcagcaaatgacataattaaatatgcacttcaaaaaaaaaatgtctttggctgctgtgggaaattggattgcaaatcttcaagaccaaaagtaggtagaacatgtgagaatcaattacaatattccaggaaagagtggtgaagggctttaagataatgtcagtggggctggagagaggtgaataggtttgattgatgtttaggggttttgactaaacaggacttggttaataggtaagagaaatagggattaataatcactcacatttctggcttggacaactaggaggatgggaatgacatttactgagttaggatatccaaagaagaagcagactgggggcaaggggagtgaattaatttaaattgtaactaatgaagggcttattctgtatgaaattcaagagaagtattccagtccttaaagcattttcaaatgccaagggatatattaaccaataagtggtatagaacaatactaggggtactataatttatcacagatggtcatcaataaagcaagagagagagataaaagagcttaaagaagaaattgcctctctctcagaaagaattagtgggagaatctgatgttcttcatgaaagaaaaaaattttagttgaatcttgcataaaaagattagacagatgggaattgtcgagggtggaggcactgtacactacatgaagcatatttaaggaatgataacagtctagattgctagcaagcttgaataggcaaaataaaatagaaaggttagggattagttgaattagtcagaactgttgagattccaagagaaaaacaaaattcacattttctgtgttgatctattattgcaaggtgcattagtcagctattgctacagtaatgctaccgaacaatcaactacaaaataccaatgacatttgcttcttgctcatagtcctactaatgggtcagaatagtgctgcttcaggctgcaggttgccttcatgcttgttcttcatgtttctccttcttggaccagtgatctcccagggcgtgtccttgtggcacagtttacaactcccaatgtggcaagtagaaatgttcaatactttgtaaggcctcagtttataaagcagtatcatttgtgcccacattctgttagccacagcacataatgtgactaaacccaatatcactgagggaggagagcatgaggaagaaaaggatggtgaatatatgctgcaatgcctaaaacataatgtaaatatagatagcattggatttgacccataagccataaagattctagaataccagtgttcccaactatggagtgcccaatgagcttcttgacaaactcaggagagtaacctccatttgtgtgacctcctttctttgctctttatttgtgcttttcaaagggatgacatgagcccataaactactcattgggttgcttggtcagaatcagaaccagttacttcaggactgtctcatttcatgattagttgcctttggtctcatgcagtggtatcagttcattcctctagaggtttatgttccctcaatcaccagcaatactgagtgaatgataagaactaaagcaataaaaaatgattgaactattttccttagtatgtagttattggacttcttccaaaaatccagcacacttataaaaaccaaactaaggcattttgctggttattgtgccaatagtgtgtcttaattagtcctgagaatttatgtggcccatgaaagaggcataattttcctaagattgcacagctaagttacatatctgagacttgaagacatcctcagattatgttatccctaaatctctaattgctatgtagcaaaagattttagccatttttttattcctgaatcaaggatacataaataaagttgtattcaatcaatccaaaaatcctcaagcccaaataatcctagtacttgagcagaccttatagtgtgtgtgcacaagtgcgcatgcgtgtactctatttttagattatcttttaagagggaccggtgacatggtcatacagtacaacagaagaactcactccctgtttctctataattcccatattacactcagcacttgctctcctttcattctgtggcttctgtgctgctagcagtgaccagtgactcaggaaggctgcatatagtgaagaaaaagttgcctttccaggcacagttcagtcctgaggcgccttttcacaccatctcatagacatttcagagccaaactctagctttctttttatgactacttttccattccacacttttcttaatgttgcaggagataatttgaaagaaaggaaaaaagaacagggagaacacaaaggcaagaagatgagcaagatgccagatttaagaagtatatttatatttagttctttacaaattaaattctgctgagacccttaaatattagctgtcacaggggttgtgcttgaaaaacttgattccaaccctaagcataaaaatcttgtctaggcagggcagtagattggaggattatcattacacattataggaggaaggccctgttcaatgccaggttccaagaatgccatctcagggagcgagggaaagacataggccaggtaacatgtctgatgtatggagaaaagccctcagggtgccatgttggtggaacaggagcagaaaggaaatcagactgagagaatgaaaactcaatagaagcacaataaacagactgaacaaagtacagatggagtcagttcaagtttaatatgaatgtccctgggccctgtgtttcatcccagtgttaagtgcaggaaatcattggatttctccaaggatgggtctttagagcaaccgactttagaaattgaatactttaaaattattttctataaacaaatttatcaatagaaaaaatagattacttaattggtttatcttaatgagaaaacaacaaaaagcttcaacaaataattgttgctgattggttggtgggttcgttggtgaataatgagaaggaaagaaggaagaaaagaaaagaaggagtagaggaggaaaggaggtgagagagggagatttgaaagggaaatagcggtgctctaagttcacaatttttaaaagcctagagttattaacaaattatgccctcaatcagattttatataacttttttcaatcttgtcatatattaatgtgctgtattcatgaaatgattttgagattttaaagcaatgattgacaatatagtagttcatttaaagtttttacaagttgctgctgacaaaatatgggtaatgaattacatcaaataagtataaatataagtacacgctttgaagttaaaactcagtaagttgttatgattaaaattgttcactttattttcctcctgtgtatgggtttctcataaatggtaacttatacctatgaaaatacagggttctataaagtctgaaaacatagttattatatatcttaacggaccgaagatgtccttcctgatattatgtatagcctgtgtttccagactaagtgccaggcactattctaagttaggcacgattctaagtgttttactgttcatttaggctgtctggctagtgtttttctcaccttatcagcatcccatttttattaagtgaatttgcctaaacacacctgcacacgcacatgcatgcgcgtgcacacacacacactttttgcatttggaagcctggctattatggaactctagaacatgagagctcagggtcaaccaccaagactcaataaggtatggctggggatgtgaccaagactatcctagcatctatggctgtggactgggtgtcttctccactgacccttgaaggtagttttgcttcactgctttagaaatggtgcagagacttaatcttatttcacttttcggtgtttgtcttggttcctgtagaactggcttgaggcttagaagatgtcctcccacctgcatttggaaaaatacatttctaacacttctcctcatatggaaatttttaagtcattgaaaaactcatactgcagcatttgtagaaacaatttcagaacagagtaccttattgcttttcctaaaagaattttaactgtgcatgtataagtattataaatgcataaaatatatagttaatccaaaagacataactatatcatgcatagtagttataggtcacctcagatatattagtaacatctttttatagagactctgttgttatttcactcacacaaaagaataaacacagaattaaggttgaaatttacataagaccagtctaaagccagccatagctatgtaatttccatgattttctcccaatcaatggaaaattactgtcagctgagccaaagtctgcagactgtgagcaaatgtctgtttccttcccacaactgagtgtttgaaacttttttcaatcagtaaaattaccattaaaggtcagagattagtttttcatgcatgatggattccatttgctttaaaagtattataccaggagagtagactttttttctgactttagaatcaaattagaattcaaatattcagagttttgggtcaacctcaaactattttattttgtttattttcccttgacaaaatgttattgttttaaatagggaaggagaaaggtcttgggaaaacacacacacacacacacacacacacacacacacatatatatgtactctctcatatttgaaattagcatgtagtttaaggatactgcacacagctctatgatgagcttaacttgaatctccttagattatgagcattttgaaagcagggacttgattttttaactaaatacctttcatgtttgataacctgttccttttcctgtgtgtattgtcttaactaaagactgcctgcaatgaacagaagggctatggtcttttttttattaagataaaagaattttccaaatcgttgtttataaaataaaagattagaaaaattcacctgtgtataaattgaactagacttctataacatagcagccatcttgtgcagaaaggggctgcttacgtagtttatttctttaacacacagttgctaattacaaaaacagcatgcatccagagattgtgaaaaaagaagttaaaaaaaatcttgcctattattctaccaccgtaacacaattatgtttaacatttttcatatttttaatttattttctctttccataaattctaatctgtctataaatgtactattgtggtctgcttcgttgactaacagaatattttcacccctttcagaaccctttttttaaaaaatggcttcttttgtgtatttgaaacaatttcaacttaaccctattgcatatattctgtaagtagctgtccttcatgaaacagacaactttttcttttaaaaatcaaggagattgtacagaactttgtgattttaattactgcatggcaaactaattcagtctcatatcctttccatttaatagggatttgtccctagctatgtgacctaagcaagctctttaactgtactccacctcaatttgcttatctgtaaaacatggataatattatttttagtctaaaacttcctctggtatgacagaaaagaccaatgtgaaacaattccctgaatttgtcaataaaccatgttacatttataaaaatgcctccagtgtacccagaccagaggaatctgtggcttatactaaaacgtgtattatgtattcattctcaaggtatatgccaacagttaagttagaaatccatccctttctctgtcacttgtccaaagtcaattactccatgcttcttttacataaggaaaactatcttaaaaggaggaagtaagatcacggacaaacaaaagttcataaggtctttcattttactgcctttcaaaaggttaagatcagagaacttagacatgcataagctttggtttgaggaacaattgagtcaaccatcgtaacagagggcctgaaagtatctgaaggtagaatgaatagtttatagtaagccagtccactctcagctctgagaacatccagctgcataacctcaagggaactgcgtggaaaaaattaagggaaattctttgggctttagagcttttcatttcctatgaacaaggcatctcctgcccttgtctcacccatatctccattgtcctcatgtagtcttctgctggttcactgtgtgcctggcaagtcaggttcttacgcgagggaaagagctgttttaagttgtttatgaatagagaaagcagattcagtcagacgtaatctgactctgtatgcctgcaggggttgtggcctttgttagtttattatgcctgtaatttgggaagtcatgctgcagagatgtaaagtgggatgggcctgaaataggtcttgtaataaaaaggcagttagggaagcctgctggtgtcctgcctggttactactatctaagtgcagcaatgtgttagttgattttaataaagagttgaaatcattgttaactggcctccctcccactgagtgaagaaggcagattacacaggcacacgtttgcctcccctagtgtgtactatgaatgcagctgcttctgaagggccagcacgtggccttcttaaaactttccttggctggggttttcccttcttgccaactggtgcccaccaagccagtggatgctctcaacgtctaggcaaatgccaaaaatgtcatctttggctcagatgtgcactggcctgttagagacaactgccatgcagagaaggaatgtcatcagctgctaggtctcaaattatcagcctggattgacagctgcaggatgtagtgcctgcctatagtactgaggccatgacccacctctggagagaccacagcctcatccctagagtagaactggaaattctccattgagacaggaaggcagcacttgaacctggcaggttttggagtgaagtgtctaaggacagaatttctcatttctccacctctgcccatgtgtaaggcagcaatattttcatagaggtgaagaaggcaggtgtcccgtggttattatgacatctgtttacctcattctagtcactgtgccatgtttcacagccattgtcaactacatttggtgaaaactgtttcctccgtccacaactggaacattgacactaaccacattctagagttcattacatagagctgtgtctgtgggtaagttaacaggtagttttaaataactagatatagtcttttcctcttccatgtaagccaagataatatttccacttctccttctgaacatgtgagtacagtttatatataaatcaacagcaagatggaaatttactctgagctttgtgatgttttcactttaagatgctgtagttctgatcctttatacatttatttcattttccccatctcaaccccagtatatagcaacactcacctgctctagaacatgattatcaactgtttcagctatcaatgtaacattaaaaaaaaagttctatgttcaaagactaaaggaacccaggtagtttcttttaaacagaaagactagttttcatgatcataaacatgtaaagaaatatgtcatttttgaaatttcatgaatcttatgtctataccgattccaattccaaactcagactggcaatctgcctttattattgcaaagccccatagcttgttatcttcatgtacctcttgatcaagtatttaagtgaaataaagagtctaaatgttacgggaggtgagtccaggcagggtctacggccctcagtttttgtcttcctggaagaaaaaaattcagctgagagacagatgtagatttcagacagaagcaaaagtttattgaagcaaagtacatttggaagggaccaagtgggcaactggaaagattgagtgtcccgcctgattattggctcaggactcttataaagttactatttcctgattcttcctgatctcctcccatcatacttccttttgggccagctgttggctaatcgccgcgtgctcagtgacttgccagtaatctgggaggggctgcatgcgccatttggtggttgtagttatgcacatgtactctttgggcaattttcctttactggtctagtgcccccagaggaaggtcatataccagtcaaactttgccattttgccccttactgtgcatgcctgctcaattcctagggttttatcgcaaagttgttgcctacaagcttaagatgtttcctgttaggaaatttccccctccctggtgccagccatgaccatctatcattcctgaagaggccacctgacagtcacaatgacagtcatttgactgtctcctgacattccttggggccctatcctgccctgctcatatccacctatctacctaccctaacatattcccccctcaagagtgtgagactcaattatttggggctagtggatgaaggtcagtcctctgtggctgcttcctgctgaaataagggctgtatttgtcctctgggtctcaatctcttgctaattgtcagaacagaatggtcccatcggtaggtagaattggtgtccagccaggtccaggggaaacaggtgtatgttttcttcacatttgggtagggaggtagatattcctgtattgcagaatttctgctcctcagttcagctaaatccaggttctgtgtcacgaccaggaaaagttaggcatgcagacacgtggaagggtgaggggaatggaatttattatttattgggcgaaaaggaaaacaagaaaagaaaaactttcagcaaagtgagaggggtttctgccagcaggctcccatctcacagattggattccaagcccccacacacgagctaaagttcccaggctctttccccccaacaaggcatgaacttcctggtagctttaccccatcgtcgcagtgcacaggcgggcgggagattctccagggatcctccctcttatctgcctcctgcatctatcacctgcattattgggaacttggtttgaaattgttatatcctggagaagacaaatttatctagtaggttaaaaggcaggggccaaaaagaagtagacgtatggagacagctggttcgagcaggggaggaaccatgtgagcaatgggagagcagattttacagagttccagatggaatctgctgagggattttctttcccagagtcatgaagccacttagcgtggtcacagattctctttatatgttcctctacttgcccactattgttgacacaagtgcaatagggtttattgatgacagcacagacgactctgttctgcaaggaggtaatctagagctagtctgttgtccatgactgcattagctactgaattcagtgaagccttgagtttagagattctgttcccagttctctgacctaggtctccaatttgtgtagagaggttttggagggtgactttatgataactgaatcctctgtatggggcagctaatcctatggcagcccctagccctaccattataaggccaagagctctccttttttaagaatttgtaatgttatagatggttacacctgttccttgtggccccaggagtcctagggcacatcccctgtatgttgggtgttatctatgcagataaaaaggtttacaagtgagggggttgaataagttcttttagaacttccctcacagggcagtttattttgtttaggtccatataaaaatacatagcctggaggggtgtaggcccactcgggaatgttggttttgaaccaagtgtaagcataagcaatcccaccatgaataagatccagagtactggggctaccttatgctgagctagcattagtttgaaagaaaagaaggcattacttataatttcattgaaagagatattatagatcttccaatgactcacaggaatactcaggtgctggtcctattgttgattgttcagaagcctctcaaggttttatttaggaatgatgtatccaactagaggtgccaggaactttgatagctgttgcagtggaaaggaaaacagtaaaagggcctttccatgaggggattagttgagattttgtagatccatcactttaggttttaataaggacctgggtgggtacacaagttggttgttagagggtctggagccagcagtactctctgtatatatatttggttctaggtatgaaattctctgtcttggatttggatactttgtaccttacattttgctaggaaggttaaggtttgtactgcatattgttgtgcaagctttatggagggggagcagatgagtaagccatctacatacagcagaagttgtccccactcaagatatagcttggttagatttctttgctgggtcttgtccaaataagtgtggggcatctctaaaaccctgaggtaggactgctggctttcctgggagaaactgggatattagggggaaatatcagtccagatgttgggtaaatattaagtggatacccattttggaaagtatattcctactcaaaagcagtgtgaggcatttagacattgccagggactagtgggagaatagtaattagtcccataagcaatataaataaaggggatgtgaatctttagaggaaggggttgctacttgctcctgttacccaacagaatttgggggtaagttgcctagagaaaaaggttagcacaaagtaggcagttcttgtatttaaaaggatatttatagcactacctgtcatttccagagtttcccttggctctgttcctttaatgatgatgtctgatttggaagctggccagagtggagggccccttcagctcaaggccattattggatgggggttcaactgggggaccttttggatcccagggcagtccctcttccagtgggacttatctccagcttatcacaaagagggcaggctgtgtggggcttcctcccatttggcccatttggaaaattccttctccagtagcctggtcttctgcatcagtggcagttacctggaggagggtccttaggagaccctggagggggctggtgggcttgtaaagcagccaatagttgagcctgcatcttgtccctgcatttctccttttccttagccctgtcctccttgtccagatctcagttataaaagactgaggaggctaatttgaggatttgtggcataggggcactgggttctaaggctgacttttgtaaattttcctaatgtctggagcagcttgggtaaattgtcctttaggactagtccctcaggagattctgggtttaagtttggtgtgcttaataagtttcctgtagacttttcagaaaggctataggatttccatttggcccctggtttatggtggctaattattgtagtttagaggcttgatcttacttcattttattacctctattagacacaagagcctatggttcctggcccatattcccgctttggcattgtagtcctgattggggtccagctggggaacagctgtagcccctccagggtagttggcattttccaggtgtaagtcatttcgacagtggattgctgctccgcagatggtctgtctttcctcttgtaaaagggcttgtcccaggagtacatttatgtccttccaaattaatctaaatgtaagagccaatttggggaagccctctatgagccttttggggtcatctgagaacttttttaggtttttcctaagttgtcaaaagtcgtacatggaaaaggggatctggacctggacgagttcagttggctcacttacctcctacaagcttggagaggagaactaaggagcccggtgtaaagtggggccaattccaaaggtctgggagtgggataaatagggggaggatccaggggtggctgtttctccctctttcacctccaaaggaggaggtagtttttccttttggcttctggaggaagaaatgttggagaggaatcagcagaggagtctccagggccgatgcagggccctggaggagatggctaagcatagctaggatgtgaggtttgccttacaagctttacgaggattagggtcttccctttaggccataaaggtttgtaaataggggacctctggctttttgccctgataatggcagaaaaggtctagccggagaatggtattaaaatttgtacttccattctctagccagacttcctctgcaatgaaaaattagttttttcattttagggtttggtggttggatttatcgcagattttaaggatgcatccaaggggtcagtcccagagtatggagacaccgttatctatctgcaagacagaacagggaagagtaaggaagaggaaagagtcccttcttcttcatcttttttctttttctgtttttttttttttttttttttttttttgagacagagtctctctctgttgctcagctggagtgcagtggtgcaatctcagctcattgcaacctctacttcctgggttcaagtgatgcttgtgcctcagccttccgaggagctgggactacagatgcataccaccaagcccagctaatttttgtatttttagtagagacggggttttgtcctgaactcaggtgatccacccgccttggcctcataaagtgctggaattataagcatgagccaccacgcccagctgaaagcattccttcctgatccccttataccttggatcagagtagtgagtagggcatcccccattcatcctggagttctggaataaaccagtgattaccaggtaccactaaccctggtcccacatttccctccaggaccagccttcatctctctgctaatggtaatctgtcctgcacctgtggcctctggctgacctgtacctttgacactgtgatcttacagtgacctttgtttggagcattccagcaatgaaatggttttcctttctctcaaattcccattctccatatccctttaggtaggtgaggatcttatccctagccagcagctgtaagggaactgggccttcctttctctggacatagcactgtaggtcccagtatatgttaagaatgtagatggtcagaggaacagaggaaaacctgcatctgagtccccttgtcatccctcctgtggattcctggggaagcatggaaaacaagtatttaaaatgacaggacaatccatctgccacccgtgggaatggtagaaaataagggatattcatggaaggctgcttttgtacagtctcacaaacagcagcccttagacctaagaggacattgcctatcagtcttctcagtgtagaggaagaactgtcagggccagggagtttgggatgagagaccacaaaaggcagagaaagaattgtcctctccccaaagtgcagatagctctagaaaggaagtaggagttgctcttaatggaccacatacagatgccctatggagacaaacaaatgacctcaagagccactggaaaacctggtctcaatgtgtagcaggatttaaaaattcatgataggaaataaagaattggtggagacagagtcttcccaatattaagcagagaaagaagttgcatgatatgcagaatagaagcagggaagaggttgacttgcccccaagacagacagtgtggccagcatataaggccatctcaaagtccacagaaaaaaaggaagcataatagggtgtagacttattggggaaaagtccactttggttaaggaaatgaaggtctccagtctttgaatggcctaggctcaagccctatcacccttgtgagccacctgtccaaaagggccacagtgacttaggtctactcagtacagactctgaagtcctccacctctgctgtcgcccaccaggatgaactgaggaatctgctagagggaagagtgaccaaagagaatttttctggagatgggctggtgagtgagacagcaagagaaagaagacctcacgtaagcagagttgggtgcctccagccaaagatggcaaggcacagagggtcttaccgagaagctgcaatctgattcatgacaccaaaatgttactggcagcgggtttgggcaggatacacagtctttggttcttattgtctgagaagaaaaaatacatccaagagacagaagtagatttaagatggcagacaggaggcaggactagattgcagctctggacagagcagcatgtggaggctcgcattgtgaattatagctccagattgactgcaagaacaaaccagcaaccttgagaggacccacacaccctctgaaggaagcagactgctcttgcaggacctgggaaacaccccaaatactgtgagtaccccaactgtggaagtgggaaagggagaccctcctctcctgaacacacacccccactggagaagctgaaggtctgtttgcaagagaagtttctgactttacctggagctgagtcaatgtggagagctgagtgaaatacagaggcaaagaaagtagcagaaaggccctggaagctctctgagtcccctagcaggccatccatgcctggcatcacagggatccatccagagggcagccagagccagaggtgcaaggggtaaaactctacagggagaagaaaatctctagctgaagtttgtaacaatttgaatggggtgagaagcctcctggccagaactcaggggagggcacacatctggcgtgcagactccacaggtggagtagaaccaatccctttcattcacagctgggaggtgggtagcctggggcagattttcaagctcatcttgccctccaactgaaaatggactcaggctgttagagggtgggagacacagtgagagtgagactagccatttggtttgggtttgcgtggaagcagagtgaggcctgtgactgctggctttcccccacttccctgacaacctgcatgactcagcagaggaagccataatcctcctaggtgcacaactccagtgacctgggaatctcacccccatcccccatagcagccctagcaagactcacccaaggagagtctgagctcagacacacctagccttgcccccacctgatggtccttccctatctaccctgggagtggaagacaaagggcatataatcttgggagttctagggttcctccccatactaccacagctgatgctctctggaaggcaacacctcctggcaggagaccagccagcacaaaaatagagcattaaaccacgaaagctaagaacccccacagagcccattgcgccccccaacccctaccccctgcaccagaacaggcactggtaacctataaaggaaaatctgtgagattaacagcagatttctcagcagaaagcctacaagctagaagggactggggccctatcttcagcctcctcaaacaaaacaattatcagccaagaattttgtacccagtgaaattaagcatcatatatgaaggaaagatacagtctttttcagaaaaacaaatgctgagaaaatttgccattaccaagccaccactacaagaactgctagaaggagctctaaatcttgaaacaaatcctggaaacacaacaaaacagaacctcttttttttttaaattattattattatactttaagttttagggtacatgtgccatgccggtgtgctgcacccattaactcgtcatttagcattaggtatatctcctaatgctatccctcccccttccccccaccccacaacagtccccagagtgtgatgttccccttcctgtgtccatgtgttctcattgttcaattcccacctatgagtgagaacatgcggtgtttggttttttgttcttgcgatagtttactgagaatgatgatttccaatttcatccatgtccctacaaaggacatgaactcatcattttttatggctgcatagctttccatggtgtatatgtgccacattttcttaatccagtctatcattgttggacatttggattggttccaagtctttgctattgtgaatagtgccgcaataaacatacgtgtgcatgtgtctttatagcagcatgatttatagtcctttgggtatatacccggtaatgggatggctgggtcaaatggtatttctagttctagatccctgaggaatcgccacactgacttccacaatggttgaactagttgacagtcccaccaacagtgtaaaagtattcctatttctccacatcctctccagcacctgttgtttcctgacttttgaatgattgccattctaactgatgtgagatggtatctcattgtggttttgatttgcatttctctgatggccagtgatggtgagcattttttcatgtgttttttggctgcataaatgtcttcttttgagaagtgtctgttcatatccttcgcccactttctgatggggttgtttgtttttttcttgtgaatttgtttgagttcattgtagattctggatgttagccctttgtcagatgagtaggttgcgaaaattttctcccattttgtaggttgcctgttcactctgatggtagtttcttttgctgtgcagaagctctttagtttaattagatcccatttatcaattttggcttttgttgccattgcttttggtgttttagacgtgaagtccttgcccatgcctgtgtcctgaatggtaatgcctgggttttcttctagggtttttatggttttaggtctaacatgtaagtctttaatccatcttgaattaatttttgtataaggtgtaaggaagggatccagtttcagctttctaaatatggctagccagttttcccagaaccgtttattaaatagggaatcctttccccattgcttgtttttctcaggtttgtcaaagatcagatagttgtagatatgcggcattatttctgagggctctgttctgttccattgatctatatctctgttttggtaccagtaccatgctgttttggttactgtagccttgtagtatagtttgaagtcaggtagcgtgatgcctccagctttgttcttttggcttaggtttgacttggtgatgcaggctcttttttggttccatatgaactttaaagtagttttttccaattctgtgaagaaagtcatgggtagcttgatggggatggcattgaatctttaaattaccttgggcaatacggccattttcacgatattgattcttcctacccatgagcatggaatgttcttccatttgtttgtatcctcttttatttcattgagcagtggtttgcagttctccttgaagaagtccttcatgtcgcttgtaagttggattcataggtattttattctctttgaagcaattgtgaatgggagtttactgatgatttggctctctgtttgtctgttattggtgtataagaatgcttgtgatttttgcacagaacctctttaaagcgtaaatcacaaaggacctgtaaaacaaaaatacaagctaaaaagcgaaaacaaaacaaaacaaaagtatacaggcaacaaagagcatgatgaatgcaatggtacctcacatttcgatactgacattgaatgtaaatggcctaaatgctccacttaaaagatgcagaactgcagaatggataagaactcaccaaccaactatctgctgccttcaggagactcacctaacacataaggaccaacataaacttaaagtaaaggggtggaaaagactttccatgcaaatggacaccaaaagccagcagaggtagctattcttgtgtcacacaaaacaaactttaaagcaatagcagttaaaagagacaaagagggatattatataatggtaaaaggccttctccaacaggaatatgtcacaatgctaaacatatattcacttaacaatggagcccccaaatttataaaacaattactaacagacctaagaaatgagatagacagcaacacaacaatagtgggggacttcagtacttcactgacagcactagacaggtcatcaagacaaaaagtcaacaaagaaacaatggatttaaactgtaccttggaacaaatggacttaacagatatatacagaacaactgcaaaatatacattctattcaacagtgcatggaactttctccaagatagaccatatgataggccataaaatgagccttagtgaatttaagaaaattgaattatatcaagcactctgtcagaccacagtggaataaaactggaaatcaactccaaatggaatcttcaaaaccatgcaaatacatggaaattaaataacctgctcctgaatgagcattgtgtcaaaaatgaaatcaagatggaaattatacaattatttgaactgaacaacaataatgacacaacttatcaaaacctctgggatacagcaaaggtggtgctaagaggaaagttcatagccctaaatgcctacatcaaaaagactgaaagagcaaaaaagacaatctacagtcacacctcagggatctagaaacaagaacaaaccaaacccaaacccagcagaagaaaggaaataatcaagatcagagcagaactaaatgaaattgaaacaaaaaaaaaccatacaaaaaaataaataaataaatgaaacaaaacctggttctttgagaaaataaataaaattgatagaccattagcaagattaaccaagaaaagaagagagaaaatccaaataacttcactaagaaatgaaacaggagatattacaactgacaccactgaaatacaaaagatattcaaggctactatgaacacctttatgcacataaactagaaaacctagaagagatggataaattcctggaaaaatacaacactcctagcttaaatcaggaagaattagatacactgaacagatcaataacaagcagagagattgaaatggtacttaaaaaattatcaacaaaaagaagtccaagacccgacagattcacagcagcattctaccagacattcaaagaattggtaccaatccttttgacactattccacaagatagagaaagaaggaaccttccctaattcgttctatgaagccagcatcaccctagtaccaaaaccaggaaaggacataaccaaaaaagaaaactacagatcaatatccttgataaacatagatggtaaaatccttaacaaaatactagctgactgaatccaacaacatatcaaaaagataatccaccatgatcaagtgggtttcataccaggggtgcagagatggtttaatgtacacaagtcaataaatgtgatacaccacataaacagaattaaaaacaaaaattccatgatcatctcaatagatgcagaaaaagcattcaacaaaatccagcatccctttatgattaaagctctcagcaaaatcagcatacaagggacatacattaatgtaataaaaactatctatgacaaacccacagccaacgtaatactgaatggggaaaagttgaaagaattccctctgagaactggaacaagacaatgatgcccactctcaccactcttcttcaacatagtaatggaagtcctagcaagagcaatcagacaagagggagaaataaagggcatccaaatcggtaaagaggaagtcaaactgtcactgtttgctgatgatatgattatttaccttgaaaactctaagaactcctccagcaagctcctagaactgataaatgaattcaagaaagtttctggatacaagattaatgtacacaaatcagtagctcttctatataccaacagtgaccaaggggagaatcaaatcaagaactcaacccattttacaatagctgtaaaaaaaataaaataaaatacttaagaatatacctaacaaaggagtcgagagacttctacaaggaaaactacaaaacactgctgaaaggaatcatagacaatacaaacaaatgggaacacatcccgtgatcatggatgggtagaatcaatattgtgaaaatgcccatactgccaaaagcaacctacaaattcaacacaatccccatcaaaataacaccatcattcttcacagaattagaaaaaacaattctaaaactcagatggaaccaaaaaagagcctgcatagccaaagcaagaccaagcaaaaagtacaaatctggaggcatcacactacctgatttcaaattatactataaggccatagtcaccaaaatggcatggtactggtataaaaatagacatatagaccaatggaacagaatagagaacccggagataaacccaaatacttacagccaactgatcttcaacaaagcaaacaaaaacataaagtggggaaaaggataaccttttcaacaaatggtgctgagataattggctagccacacataggagaatgaaactagatcctatctctcaccgtatacaaaaatcaactcaagatggattaagggcttaaacctaagacgtgaaactatgaaattttagaagataactttggaaaaacccttctagacattggcttaggcaaggatttcatgaccaagaacccaaaagcaaatgcaataaaaacaaagataaatagctgggacctcattaaactttacgagcttttgcagggcaaaaggaacagtcagcagagtaaacagacaacccacagagtgggagaaaaatcttcacaatctatacctctgacaaagggtagtatccagaatctacaaggaccccaaacaaatcagtaagaaaaaaacaaacaatcccatcaaaaagtaggctaagggcatgagtaggcaattcacaaaagaagatatacaaatggcaagcaaacatatgaaaaaatgctcaacatcactaatgatcaaggaaatgcaaatcaaaaacacaaaatgtgataccaccgtacttctgcaagaatggccataataaaaaaattttaaaaaacagtagatgttggcatggaaggggtgatcaggaaacacttctacactgctggtgggaatgcaaactagtacagccattatgggaaacagtgtggggattccttaaagaactaaaagtagaactaccacttgatccagcagtcccactactaggtatctacccagaggaaaagaagtcattatttgaaaaagacacttgtacacgtatgtttatagcagcacaattcacaattgcaaaactgtggaactaacccaaatgtccatcagtcaataagtggataaagaaactgtggtgtacagatatatatacaatgaaatactacacagctatgaaaaggaatgaattaacagcatttgcagtgacctggatgagattggagactattattctaagtgaagtaactcaggaatagaaaagcaaacatcatatgttctcactgatatgtgggatctaagctatgaggacacaaagatataagaatgatacaatggactttggggacttggggggaagagtgggaggggggtgagggataaaagattacaaatatggtgcagtgtatactgcttgggtgatgggtgcaccaaaatctcacaaatcaccactaaagaacttacttatataactaaatataccacctgtaccctaataacttatggaaaaaaattttataaaaagtaatagatttaagtcagaagtttattgaagcaaagtaaagtacattcggaagggaccaagtggaaaatttaaaagattgagtgccccgcttgatcattggttcaaggcttttatagagttactgtatcctgattcttcctgatctcctcccctcatccttcttgggggaactgttggctaatccttgcatgcgcagtaacttgctaatatctgtcaggggctgcatgtgccgtttggtggctgaagttgtgtgtatgctctccatgacaatttttcgttactggtctagtgcccccaaaggaaggtcacatatcaggcaaactctgacgttttgccccttcttgagcatgcctggacatatccccgaaggaaggccaaactccgccattttgccccttactgcagatgcctggtcatgtttgcttagttcctgggatcttatgaggaagttgttgctcataagctcaagatgtttcctgtttgggaggaaattttccccttcttggtgccagccatgaccatctgtcattcccaaggaggcccctgacaattgcatgacagtcacctgactgttgcctgacattccttggggcactctcctaccctgctcatatctgcctatctgcctaagtaacatgaagacattttaaaccttctcagtggttctcccatttcttctctctctctctcccccactttcccttcaaaccacctcaaaactcctttctatttctactcagcaaaatggagattaaaacctcactaaaatgtgtctttgcccacccctgccttcccatttcacagcgcacttctttcttcaaacagatttagatttacagaggaaaaaaggcagaaattctctttaccggcttcagacacttaaagaaaatctgtccttttcatctctacacgttaaaatatttgctataataagtgtagattcaagagccatttggacatatctggcttttaaatagtgttgactaatgaccaacttaacttagatctttgaatctatgtgtggtgttatgatatatattagttttcatctgaggtctagctcataactcccacagcccttgttacagtcttttgttataatgttgggtgtgttaggcctcaggggcaggcccctgaccttctccttctctcctttcacctgttcctgcctttctgattgtggcttttaagaccttccccagagagagtactgccctataccctgggggaaggaatgctgatgtcatgaagcctccataaaatcccagaaggacagggttcagtgagcttccacatagctgaacacttggactttcatggaggttggcacagccaggtaaggcatggaagctccacaccccttcccccatacctcaccctatatgcatctcttaatcggtaacatttgcaatatcctttataataaactagcaaacataagtaagtgttcccctgggttctgtgagccactccagcaaattaattgaacccaaagagaggattatgagtatgccaacttggaggtggccggttagaagctccagaggcccacacttgtgactggtgtggtggggggcagtcttgggaactgaaccttcaaccggtgggatctgacattatctccaggtagacagcgttggaactgaattacaggacacccagctagtgttggctgcttggtgtgggggggaaacctcacatgtttgttcgtagaaggcttcatctgtgttgatgatttttgtggtgtgagagtagaggaaaaatgccatcagggagagttttctctacaccctatagctcctagatgctttttatttaagacattcaaaccttgtgaaaaacaaacaaacacaaaaatctttttatttaagacggtcaaaccttgttcaaaacagcacagacattaactcggaatttaggatttattattgattaattgacattatcttcagtctgttcatattattaagtgatataagtcaggtacacacacacatgtatggggagtgtgtgggagtgtctgcatgaagtatactgtcagaaaatatactcatttcaaagaaacactgatttaggccctggcaaataaggaaacatttctatttcttctagaaataacacattcatttgccaacatctgatctatccatatgacctcttaatacacacatgaaataataaagtgtatttttcattcatttaataagcatgtgattcacgtgacactgtaagccttttttttttttttttttttttttttgagacagaccctttttctgtcgcccaggctggagtgcagtggtgtgatctctgctcactgcaacctccacctcctgagttcaagcgattctcctgcctcagcctcccaagtagccgggactacaggcacgggacaccacgcctggctaatttttttgtattttttgtagagacagggtttcgccatgttggccagactggtctgaaactcctgacctcaggtgatctgcccacctcggcctcccaaagtgctgggattaaaggcgtgagccactgcgcctgggcgagcatttttttttattccagtgtttctcgttaatctaccccatggcgttttatttcaggttgtatgtatgccagagatgaaaaaaggcaaatgacagaagagcaagtatatggagaaagataggagggacttgagaaaacttggcaatttactaaaatgaaatggcattgtttccatatttaccaaaaacagacaaacaaacctaatcattcctctcattttgatcagctttcatgtatattttctaggcctaatcaaaatcttctttggtgtcacaaaataatggaagagacatgtattggtttaggctcctgcagcagtagaccccaatataaggaatattagttgtttatttaggaaattcaagaaacataagtaaaggagtagggaagtgagacaggaaatggaaggatctctgaaaaaatacacatcatcaagtccgttcccacagagggaaacaggagctcagtccccattgttgggttctggaagacagtgtggaacagaccccagagttatcccaactgtgagatgaggaagctggggtgcttttcaccaactcttcatccatcacctgcttccgggggtcattaacaatccaccactcccaggttatttatgctcaggccaggcatgtaactgcagccagaaaatagcccttgccaagactcacaggaattaaaaaccttcaggcaaggagctactggtctttgtaataataagctttgagaggcgggtattcagaggctatgggcaccaataacttcccttatgtgagtcataaacacaaagttaattttgtttgcatgtgtatacaagtattttgaatgaatgcttctctttgttttgtgtgtttggaaaatttaaacaaaattattattgtttttgtattggtatttaaacatctgaatatgtaacatcaaagatgatattaaaaagtataaagcaaattatcacaaaatcagatgtgcagttacatgtttacttgaaattctctctagactacatttgaaataggagcttccatagggggaaatttaaattttttttacaagttgtttaattataatgtgctttaaaaacactttagcatatcataaaccttcaaaacaaaatgagtaatcatcttctgagatccatagaaaatgtttcttaaatgtcactttcaattaccacttctggagctaacttgcaaaacaattgtgtttccaccaactgaaatatgttttcaccaaatttaagataatctgtggtcagtgtgagctttgtcttgatttaggaggaggaaagcaaagttccatttatgaatactttgaaaattttcagaaattctcctaaattgtttcagcaaccaggccaaaagagaggcctggaatcccaaggtgagaggaaactttaaaagttacacttatggccaggcacggtggctcacaccgtaattccagcactttgggagactgaaatgggtggatcacttgaggccaggagttcaggaccagcctggtcaacatggtgaaaccccatctctactaaaaatacaaaaattagcctggtgtggtggtgcatacctgtaatcccagccacttggcaggctgagacatgagaatcacttgcacccaggagacagaggctgcagtgagtgagatcatcccactgcactccaacctagacaacagagtgacactctgtctcaaaaaaaaaaaaaaaaaaaaagtttcacttgtgccttggggttggctgcctgctatcatatttttgttgtgttcttctaccccaagctccagtacctcccctcacagaaatcacctctcctaccaaccccaagggaacccattccatttttattagagagttcttctttacatggcctcaagtcttttcatcaagatttactgatagaataacagtaaatccacattactccaggtgtctctttgcccttacctagcctttgtgtctatgccattcttctcaaggaaattgccttcctttatcagctttaaaagtccatatttgggatcccctctcctggaaacattctctgactatccagcccagataattttttttctctgctttctcattataacattcatgatctgtgtcattcattcattcattcatttgcccaatatttcttgagtgcttcctaagttcaggcactgttctaggtactggggacataggaggatagaagccagtcaaattttgcactcactgaaactttactttagtaggtaagaatctatagtttaaaaaaaaattcacatatgaggcctgtgaagcaaataaagcaataatgtggtggttttcatggacattatgtctttcactacccgtccctctttttgttgtaaactctctaaggcaagtataacctcatctatacattagtatttatttaccacaaggacccataagtatttattgatatatcttcctaagtatgtgataatattctaaatagatagtagatttaatcattgggatttatgtgaagttggattaaatagataacatgataattacatttagtattgcatggaaggacacattttctcacttatagaagcctaaacaaatgtcacaatgttgatagattcctttataggatgttaactctgaagctgtcgtgaaaatgtgtgaactagtttcactttcaacttgatccttttggaatcatgacagattttgctagcccttaattcttctgcaatctttgttgatccctcctatttcaatctcataagacacttatctctcctccagaaagatctgaagggttaagtcacctatttatacctaattacagtgagccctgtgttggatttttaagggataaaaggaagtatcagatctcagttaacttatgtactgtctacagtgcctaacaatgacacaggatgactcagttaaggagaaaaatactccatttatcagcacagaattcttccctttaagctatcatatggcagctaaccttgcctaaccttgcgagtttaaccttgctttttacgtgcatgcacgcgtgtgtgtgtgtgtgtgtgtgtgtgttactaatttctaactgtaccagctcctgaattaatatttggcaacatcaatattccttgtataatgaagaagcatggtccaagagacttggatgtgacctctctaaacatcaacttacagctgcaaaataaggaataagttgtaattattccttatttgtaacaactaccttacagtgttgttttgaagattagaagagaatatatagatgaagtacccagtggacagtaggtattgaataaatgttagtttccttccaccttctctggcttatgtaacaaaattactcattctactagtcactcagactttagttaatcattagctaaagagtaacaatgcaggattttttttttaataaattggctaggattggttttatgcctggatggaataggcacttgccatttcatcacaattcaaaattcctcctgaaggcctgaaggcctgaaatgtttaccattggaaactaatcccactgtatggttactattatttattatatctattaacttataaaatattaaaatataaagtaaatattaccctactgatgcattagccactcaacataaatgagtttcttggagattaataaagcagtacatcagtatgtcccaaacaatggctaaaaggaaacctagtaaccaccccgaccccaaacttgttttgttaggccagtcagatttttttttttcattttgaattagcatcacgattgaaagtggaaagatctcacatataacttcacatttctctgtacaattgagaaacgttggctatgttggctctctgaatagcagctacctcctttcaaggtttgtatttacaatatttcccacccccatgagtccttattatcctgacactgaggacaaatatgagttgctgtccatcagcattccaaagctgtttttttttttgttttttttttcttacacttagcctacttcactccctaacaccaccagcctgatttctgagggggcctgaggtaggaggaggagaatggagagcactttctctgagagccgccattttaacagatcattaaagacacgatattcacatgacggttgcttactctctgatgaaaactacaaaaacagaatacacagggaaggtaatctgaaggtgatacctttttcctatgatccttggccttataaccactaatcaagcctgagggccgaagttcctgcctcatctctgcctgatgttacgaactaggcaggctagcagaggcaacaggcaacctgggcacctgaagagctacctggataacctagaagaacagtaggaggttaaagatgaggacaagtctatcaaaacaaaagcctgtcaagaccagaaagagaaagtcacacttttgactttacagtttgtgctgggctgacacaaaggcctcagttaacaccaaatacaacttccatagacttcaagtttccctcatatttttcctgggtcactattccagagttgagaaactgaactacatctaatattttattaaaataaaattgaagattattagaaaagtttattagtcaatagtaaaacgttatttggttagctttcttaaacaatggcatttatagatatctgattatcccaacaaaaatcttcaaatggttcatggacgctttgtcaagcttttgtgccacctgagagaaaaaaagataaatggggaggtataatgttaattttgtagcctttgcttaatgtttatttttgaaatgcctatcattttctatcagtatctgaaactccatggatttctattagccttcaccaataattacatttgaaagcatccagaagagacaatccttaccacagtctcttttaaactcttaatggctgtcacaaaattctatttttcattttctctaagagcattctattaaactgttcctagttattagctttcataaaggcacacagaaaatgtttcctctacagccacaaatattcctaaagcagaatcatagtaaaacagctgtgataatgttttattcattccagaatcctaatgattgaacaaaagagagacagtcttaagagttaacatctattgagtccgtgactgcgtgcattgttctttcaagtattttacctgcactatttaatgtaattctcccagccactctgatttcactcattttacaattgaggagactgaggcatagaaaactaaagcaatttggctggagtaagggccaggttgggacttataccttggcggtctgcctacaaggtgttcctcaccaccatctgacactgctttctctgtgtagcccagagtgtcagcctcagtgcttcaacttgagctttcaggatctatttaaagatggaaaatatagttacattatgtcaccatttgagatgcagaaagacagggccaccattttgcacaattctgaaagcacaattcatgctgtggtttgtaaaaatggtactccctagagttgggcaatggacagctcacacagagatgcagtggccctgctaaactaatgccttacataaaagagttttactcttcattcccttaaatgattcttagtaacactggctgacacacacacaaaacagtttctaagtaggtctgtccgcatactatgatcactggtcaacattaagtttccacaattaattttacataatccaaagactgccaagcagtttatctgggtaaactaaacattctgtagtcatttattctgcttccagtcatgcccagcaacaggttgagaagacaaatgttctcagaaatgatctccaaggagttgggagcaggctgcttatacgtctaattcaccagaataggtgagcgtggtcgtggtgaccttttcatactgttgcagagctgagtatgaagagatgactcacagtcctccaatgcaacacaggtgaccctgcagccagattttgccttcagtggtatgtgactcccatggggtcaggagagtatctcagacattgaaatttgacctaatggcctacctacctgcacacgcaccctgcccacttacagaagggcaagaactctgcattactgaggccttgttattattatagttcctatttaggtaagaacgcaatggagaaaaaatgcatttggttattgggcctctgtttgaatatcctgtgctttttgccaaacaatgcattctacataatcttaaaaaacaaagtccatttcaaagaacaaaaataatgaccatatccactgagcaattgagcagaatgggaatcggagttttaaactctgatatatctgttttccttagggctgaaatcttcttttcatggttctagtttctctaattgaaataagaacctaaccctgttcaaaactacatctctgggaatgagtgaaaaattaatgatcctcctattttgttggatcataataatgactctcatcctggtggggccaccagcaatgctattcttctcagactctatcttagttcctaagccactcaccaggtatttaaaagaatgatttaacacaactagaatcatttaaataactgtattttttaagaaagccatattattgctttagtttggtcattcatatatccaaaccttggactcatcatcttgcaatctcatgtgttcagttattccagagaaaacattaaggagaattgtattcttcttcccagctaaattttaggtcctcaaagctggcaaccacaatttatgctttctaaaaatcatctatgatactaagtatgagctggatcatgaataaaacccttgtaacaataaatgcttgatgacttacttcatctcattagcaagggaaggtaactcataattatcaaggtactacaggaaatagggcactatctggaaatgctaaatacatctccttgcatgaatcacttcttaccagaattccctttctttccagatcccacctccagggttctgtggtccataccaggcactacattcctcaggggctacagcctatgagcgtctcatggggctatgaaaccatttgagacctggaaaatgaagtaattgaatacaaacagaaaactgcaaaatgaggactaacatttaattaaatgttcaaagcataagattatgtcgacttcaataattgtcaaatgagtattcttaacattttactaaattaaaaaaacttatgtgctgagttttttattttacaagtatctccaagtatgctggatgattgcaaagaaaatcaaggccagtcattggttaaatgagtttaatagtagccacataatttcaaaagcaaaattataaagacccttcccagactgttgatagcaaaaataatctacgttgtggaaagtgggtccatgttaatatgttagatataagtagtgaggcctaaaaaggtattaaaacatctttgcttaaggtactacctatttgcaagattgttattttaaaaatagcttatgttttaaattgttattgctttttatcactctaataagaatttatagttgctgtaagataacaagaaaaaggttaactatctgcagagatgcctgagagtcagccagggagtaacttaaatcctgcaggaatctgactcactgaagactgtcaactgaatgaaggcttaaatttcatggtcttgggtgggagaactttttcatattctttccccatatggaataacaatctgccctgaaaacagggagtattttggcatgatctctttttgcttatttgccttccattttccataaagcaacttttgccaagcaccatacttaagactcaacttttttgcaaaaatatcagacaaagcactgtctttaagaacacagagaacacactagatcccttcttctgaaaatcactgttctatgttgtttgtggatatttttttagcattcactgcatgcctggaatgaataggctgtgtttctccccaaaagagcacaaattaatatacaaggtcaggttaaatagttaagtctgctttcctatcccttatacagaagctatccattcaaaaaaaaaaaaaaaaaacttctttttactttttttaatttttaattttggtgcatacatagtaggtgtatatatttgtggaatacatacaaacatacaatgcataataatcacatcatggtaaatgggtatgcatcacctcaagcatttatcctttttttatgttacaaacaatccaattttaccctataattgcttaaaaaacatacaataaattgttaactatagtcaccctgttgtactatcaaatattagctcttattgattctatctaattacatttttttatacccgctaagtatcccacccttccctccacgctaccctacctaacctccggaaactgtcttctgctctctatctccttcgtttgttttaatttttagctcccacaaaaagggagaacatgtgaagtttgtgtttctgtgagtaacttatttcacctaacataattatctccacttccatccgtattgttgcagatgacaggacctcattcttttttatggctaaatagtactacattatatatatgcaccatattttctttatctatttgcctgttgatagaaatttagattgcttccaaatcctggctattgttaatagtgctgcaataaacatgggagtatagataactctttgatattttgactttctttcttttgggtatgtacttagcagtgggattgctagatcatatggtagctctatttttagtcttttgaggagtcttcaaactgttctccatagtggttgtactaatttacattcccatcaaaagtgtaccagggttcccttttctttacatcctcaccagcatttcttattatttgtcttttgcataaaagccattttagctggagtgagatgacatctcacaatagttttgatttgcatttctctgacgatcaatgatgttgagcaccttttcatatacttgtttaccatttttatgtcttcttttgagaaatgtgtgttcagatgttttgcctatttttaaatcagattaattttttcctgtagagttgtttgagcttcttatatattctgattattaatcccttgtcagatggatagtttgcaaatatttcctcccattatgtgggttgtctcttcactttgtcaattgttcctttgctgtgcagaagctttttaatttgatgtgatcctatttgtcccatttgtccatttttgctttggttgcctatgcttgtagggtattacttaagaaattgttacccagtccaatgttctagagactttcttcaatgttttcttttagtagtttcatagttcagagtcttagacttaagtctttcatccattttgacttgatttttgtatatggcaaaagatagaagtctagtttccttcttctgcatgtggatatccagttttcccagcaccatttattaaggagactgtcttttcccaaagtatatacttggcgcctttgttgaaaatgagttcgctgtagatgtatggattcatttctgggttcaaaactggtattccagttttgttctttttgctcgggatacctttggctattttgagtcttttatagtttcatataaattttaggattttttttctatttctgggaagaatgtccttggtatttttatagggactacattgaatctgtagattgctttgggtagtatgaacgttttaacaatattgatccttccaattcatgaatgtggaatatctttccatttttttgtgttctctttttttccattagtatttgatagttgatagatcattgtagacttttttggtttagttaaccctaggtacttaattttatttgtacctattgcaaatgggattactttctccatttctttttcagattgttcactgttggcatgtagaaatgctactaatttttgtatgtttgttttgtatcctacaactttgctgaatttatttatcagttctaatagtgttttggtggaatcttcaggtttttccaaatttaagatcatattttctgcaaatgggataatttgccttcttcctttcaaatttctttctttggtctgattgttctagcaaggacttccagtattattaatatattgaatactagtggtgaaagtgggcatccttatcttgtcccacctcttggaagaagagtcttcagttataccctattcagtatgataccagctgtgagtctgttatatatgacttttattgtgttgaggtatttccttttatacccgattttttgaggatttttatcatgaagggatgttgaattttatcaaatgcttattcagcatctgttgaaatggtcatatggtttttgtccttcctgtcttccttttagtaaaagtgattttctctggtggcgtgttttaattttttgctttttattttttgagaacctgttgtatattttttgatttgcgattaccaggaggcttgtaaataatatattgtaactcattattttaaactgataacaacttaacactgattgcataaacaaactaacaagcaaagggaaaaccaataaaaactctacattttaactttgtcccccgctttaaaactttctgttgtctttatatcttattgtattgtctgtatttcaaaaaatagttgtagttattatttttgatcagtttatcttttattctttctatttaagatatgagttgtttacatactataataacagtgttataatattctgtgtttttctgtgtatttactaatgctagtgagctttgttcctccagatgatttcttattgctcattaatatgcttttctttcagattgaagagaattctttagcatttcttacaggataggtctggtgttgatgacatccctcagcttttgtttgtttgggaaagtcttgatttctccatgtttggagaatatttttacaggatatactagcctgagataaaagtttttttccctttagcactgtgaatatgtctcctgccctataaggtttccactgagaagtctgctgccagatatattggaactccagtgtatgttttttctttattttttcttgccgcttttcagattctttcttatctttgacctttgtgagtttgagtattgaatgccttgagctagtcttctttgggttatatctgcttggtgttctataaccttattatacttgaatattgttatatttctctaggtttaggaaggtctctgttattttccctttgaataaattttctacccccatctctctttctaacttttttttaaggtcaataactcttagatttgcccttttgagactattttctaagtcttctaggaatgcctctttcttttttattattttttcttttgtcttctctttgtattttcaagtaggctgtcttcaagctcacagttctttcttctgcttgattgttttgtgctgttaagagactctgagacatttttcagtatgtcagttgcgtgttttaactccagaatttccgcttgattcttttaaattattttaatctctttgttgaatttatctgataggattctgaattccttctgtgtgttatcttgaattccattgagtttcctctgtctaaaaggtcacatatctctgtctctccaggactggtcactgatgccttatttagtttgtttggtgatgtcatgttttcctggataggctttatgcttgtggatgttcgttgttgtctgggcattgaagagttgggtatttattgtagccttgcagtctgggcttgtttgtacctgtccttcttggtgaggctttccagatgcttgaagaaacttgggtgttgtggtctgagttttgggtcactgcaggaatatctgcattagggagcactccaagcccagtaacactgtggctcttgcagaggtaccaccttagtagtcttggataatatccagagtcattctctggattaccaggcagagactcttttttctcttctcttactttctcccaaacaaacagattcagtctcagtctgtctgtctgtctgtctgtctctctctctctctctctgtgtgtgtctctgtttcctggatctgggggaggggtaacacaaatacccctgtggccaccaccactgggactgcatagggtcagacctgaagccagcatagcactgggtcttgcccaaagcctgcagtaaccactgcttggctcctgcctatgtttgctcaaggcactagggctctataatcagcaggtggtaaagccagccaggcttgtatccttcccttcaagacaactagttcctcctagtcctgggcaggtctagagatgacgtccaggagccagggcctggagtcagaaatcttaggaatctaccggtactctattctacggtgggtgagctggcacccaagtcacaagacaaagtccttcccactcttccttctcctttccacaagcagaggagtctctccctgtggccaccactgccccaggcctgcgacaagtactgtctggctactgctgatgttcattcaaggcccaggggctcttcaatcagcttgtggtgaatgctgccaggcctaggaatctattttggggcagtgggcccacctgtaagccagggaaggtccagaaataccatctaaagccaagccctggaatcaggaacccctagaacccctttggtgctttaccctgctgtggctaagctggtacctaagctgatttttggttcttatgaaggtgcatgaaggtgcttttttgtgtggagagttgttcaatttgttgttcctttgggaggctgctatttagccatatggctccacctccctctccatccaaaaagaaaactttaaatgaaaatatacatccaaagaaagtgtttttgaaataaaaaataaatggtcttaattccaaggaaagaaccaacatagtaaagtaaaaatgcattttttccaaaagttacttgtttgatcacatattgtattttattttaatgaaatatctagaataggtaagtccatagagaatacaaaacaggttagtagttgccagggaatgtgagtgtgcagaatgaggagtcattgcttaatggcactgttttcaagagttacttttgagtacacttgcagtctggtatctaaataattgaaatatttgaaagtcgtgattcctagaataaaaacagtgactaacttttaatgatttcaatgtcatgtgcacaaaaaaaccatgtccagagtaataagtttacccattctaccattcttttcaaagaattgcttaaataagttttaaaaaatttcctattgagatgttacttaaaatacgatttgtttagttctcaaggttatgctttccccaggttatgcttcatttgggtaatctaagtttaagtcctaatgtaagacctagggcatggtacttaacttcctgtagacctcagttttcttgactgtgtggtggaagaaataatagtacctagcttgtgagtttgttttaaatgttaaatgagagaacatgtggaacatcttacccagtgcctggcacatggtgagcaatcaataaatgggagttcatcctgtcatcttcagatttctcttctggagccagccaggcttgagttctgacctggttcatccactgaacttgtaggggaagcacttagtgcccttcggtcctctcatccagtacatggatatacagtcttcatgtggttgatacaaatacgaatgtgctaatgcatctttaccaaaaagagaggtaaaagaaaggaaggataatcctgccagagatacatatgcaaagatctgaaagtaatcgagagtgaggggttgcagattggacaacacttagtagtggctccagataaggttcttaaagactggccaggatgcagccttttcatccagagaaacagccatctcattcatagacagtggtgactgattggcagattttataagatgacacaaacaccctccccattgtcctgccaaaatgtggggaaactcttcctggaaaagttatttctttgaattgagcttccaaaaggttcctattagaattcaaatactctgtctgggttgaatatcacattgcataatagtttctccagattaaggccatttttcctaaatatttaacaaaaaatttttcgcttcttatcaatgatgctggcgttggttcagtgcctgcataagacttcttccagtgtatttctttaccctggcaaccagttcctttttctttgggagaattttttttttaattataacactattgtaggaactcctttttggcacagaaggcatctaaagtaacttttagagatagaggcttatgaaaaacaagaaagaggcaagactcagtttttgaaatctaattccagccatgaagcaaatgccacaaaagggcacaggaagaaaatctgtaaagggcttatctaccaccgttgaccaaagatttattctgctgttaagcaaataccttgtaagccagatattgtgctaggtattctgaatacaaagatgcagaagcctcattccctgttttctttttttttttttttattatactttaagttttagggtacatgtgcacattgtgcaggttagttacatatgtatacatgtgccatgctggtgcactgcacccactaacgcgtcatctagcattaggtatatctcccaatgctatccctcccccctccccccaccccaccacagtccccagagtgtgatattccccttcctgtgtccatgtgatctcattgttcaattcccacctatgagtgagaatatgcggtgtttggttttttgttcttgcgatagtttactgagaatgatggtttccaatttcatccatgtccctacaaaggacatgaactcatcattttttatggctgcatagtattccatggtgtatatgtgccacattttcttaatccagtctatcattgttggacatttgggttggttccaagtctttgctattgtgaataatgccgcaataaacatacatgtgcatgtgtctttatagcagcatgatttatagtcatttgggtatatacccagtaatgggatggctgggtcaaatggtatttctagttctagatccctgaggaatcgccacactgacttccacaatggttgaactagtttacagtcccaccaacagtgtaaaagtgttcctatttctccacatcctctccagcacctgttgtttcctgactttttaatgattgccattctaactggtgtgagatgatatctcatagtggttttgatttgcatttctctgatgaacagacacttctcaaaagaagacatttatgcagccaaaaaacacatgaaaaaatgctcatcatcattccctgttttcaaagaaactcacagcattatggaggcccaggtttctatttgggcctccataatgccttgtgctctaccaagaatggtaaaacaatcctttccagtaggagttcctagttagtggcttatagttaaccaaatgaagagaggatgaccatatggtgctgataaattgaaagaaattaggatgaacatctagagatttgcatggccagacacctaattcagattgcagagcagcaggatgggaggcgtagtcctgatttaactcttgatcaaaaagaggggtaaaagaaaagaaagataatcctgccagaaatgcgtgtgcaaagatctgaaagtgatcaagagcaagggattgcagattggacagcatgttttctcatttaatcccagaggaaccctgggaggattctaggtgtgcatattgtccttattttgtagaagaaggtactgaatcttaaagagataatgtgttttcaaagcttacagagtccaaatcgatagctaaacagtgtctgtgggatttgaatccccctgtgatgttcactgtgtgttgccatatactgcaaatgtgttataaaataataattataataaacaaaattaacctgagatattcccagattgaatcaatccaaggagactgaacttctgagtttgtcttggagttagttgggctttactgctacttatgctagatcttgaaggcagagtaggaaatatacttagcagggaagtgggagaaaggtgagaggttccccaggcaggggaaacaaagtgagcagatttggggcaaggtgtgtgagattgtgtggttggcaatatagggtgggaaaaattagttatcaagggcaaagctgaatagcagattgaacccaaatggtagaagtttttatttaacacacaaaaaaggctgaaattgatcctgtaaggaatatgaagctatagaaggtttttcatcacaggctttgacattttaaggtttgtatctttgaaagataatccaaagataagagaaaaaaaccttagatgtgtaaaatagaagtcaggaaaactacacaagctatgtgtaaagggagtcaaggggacaggatccaaaggaagacaaaagcacaaaccaattattttaaatcaaatactagtgcagtaacatatatttttaagttttaaagctgcttttctccatagcttattgattactcttttaaaacttatttttaatagcagatattatttattgattccttaccattttctagatactttgctaaggttttacatgtcttttttagtcctcagaaaattctcttctatctccattttatagctgaggaaactgaagccagggaaggttaaataatttgtttgcaatcaaacaactagtgattggtggaatttggatttgcaaccaggcagtctgactccaaaggcctcttcttaacttgatcctacatacccttcctaaatagtaggcgtttttctcagagcagctgttttacattagagaaaacttatttgtaatctgtgatcaaggagaaactgcctgagttgcctggattattttggcatttttaatatgtacaagaaaaatgttatcaaataaatgtaaatttaaaggtcctgatgagagtttactttctaataaaacaattttcaacatttcccattacatcagaaactaaattattattaaaacacatcttgtgttcatttatttttgacaggctgcttttcacatctttttttttttttttttttttttttgagctggagtttcactcttgtcgcccaggttggagtccaatgacacgatctcggctcactgcaacctcctcctcccaagttgaagcaattctcctgcctcagcctcccaagtagctgggattacaggtgctcgccaccacacccagctaagttttgtatttttttagtagagacggggtttcaccatgtttgccaggctggtctcaaactcctgacctcaggtgatccacccgtctcggcctcccaaagtgctgggattataggcatgagccaccgcgcgcagcctccaatcttattttaatgaaaatctcaatttatctcagtgttagaaactagggcttcatttggcaatgtggtctttccagttgtttcatctctttcaaaagtcttttaagaattattgaagtaagttaattttaaatttttgctttatcccttgagattggtatatagagttaggaactacttgattaaatacaggaagctactataaatttgaaataagaactaaagttataatgtgaccagactgggtaagcactgataacatttgtatatatttaaacagaaaaaaaatagttagaagaataatttttaaaaacacacaccagatgttggtaaaggcaaagatatttttgctcttgactttgtctatgaaagtcaagtgaatactttgaaagaattgatgatggataaggcaagtacattgatttctcaaggtgtgaattgttatcttcaaactttgtgcttccataattgttttttctttaataatgagacatctagaccataactggctatgtgattctgaatctacctttacaacttaatctttgtgattcccctatataagatatctagagtagtcaaattcatacggacagaaagccaaatggtgcttgtcaggggctgggagaagaggagaataggaagttactattaatgagtacagggttgtcgatttggaaggatgaaaaagttctggagatggatggagataatcgttgtgcaacagggggaatatacattacaccactgatcagtatacttagaaagggttaaaatgtcaattttacgtgatgtgtattttaccataataaaaaatacttaatatttacctatgcttagagagagttgacatatagtcatttgataaataaaatttgtaaatgcgtatgcttagataaacatagaaaattgttttaaagtagaacttatagatttctagctttaaaactgtggagaaacaatcttcctatgccatttttttctttaaaaagtcactcaaaccaataattagtacaaaaaacagaaaggtacatttcatctttgaggaaactgggagatgtctgtgactctaagccacaatacataaagatagaagtaggaagagaaaaggtcaatgacttaaccaaatcagagaacaatactaaagtgaagcaaactgagctgccccagtcgcccaaaacatactttggaagatggaagagttctaaatatagcaggtgtatgaacatgtatattatatacacttctccataagccctcactctttttcagtgtagtcaacatattttgcatccctctccatggaagacagagactttgggatactaagcaaagagtaggagaaggatggctgtatgtttaactttatttaggacaattaaatgaatgtctgcaatgtgtcagtaagaccttcagcgtccttctcctacccacaccagaatgctaggaagcatatttatatccttctctagaaaaatagagataccccagaggaaaaaatctcttacaaatagtaacatttggaagaggcaaaaaaaatccccactgggcacttgatgatactgcagtaaaactcccagtacacaagcctcacccatgcacttagaacttactgtcacctttctagggtctcattcttgtgtatgaattgggatcaggaatcaatgctggagtttgaggatattacactcattgctctttgtttacattatttacatgtatttctttaataaaatttaaatatttaattcaaaataatgttaaatttgcagagattcatttaagtttagaataaagaagaacaagaaatgtgaaagagggacaagaggagaggcagaatgcaaaggaaatacagcagcacttagaaaattttaaattagatagtttttcttctgaaatccagtattgaattagtgcaaaattctgaaagtcaattacaaaattcattttatgtcaacattactgactccatgcacaaatgtttattctagttttaaaaactagtattctgtaccttttaatagccaatgtaatttgttgacaaatattgaaatttatacgttaccagaggtctcacgtattgttaccttttaaaatgatcatttattaaccagtattgcctaatgaggcaatcaaaatgtcatctgttgcataggtaacaggaaactaccattactcatgttgtgagatggtcaaagaccttatcatattttatggctaacaaactcatgatgttgtcatatatgccctcatcacagtgtttatgatacctaaaagttagtgcctaaaaattagaaacaaggacagtgaagttagattgtttaatcctgcatatcttaaagatctaacattttctagctgttaaatatgtttatcattatactagtaatgtacgtgcaccatttttattatattaattcattgccactgtacaactaaagaggatggatgaattttaaaaacttccaaaaacttggtagcattttttaatctctttctcttcctcttttctttctgtcttccacacacacacacacacacaaacacacacatacacatacatacatgcacacatacacatcatgaagagcaagctttggaatgaaatatacctgggtccaaaaattttgaacaaattgttgactttctttatgtatgaaattattattatcacatctactttggagggatgttgtgatgtataattaagaaagtatagtctacttagcatgtaggtaattaataattagtagttattattattatcctaacctgacagtttatgaaagaggtaggaaatctgaagataggaaagccttcaaaatataatactccggacttctcctttgggaattaagaaatgtagctccaagcaaggttcatgccagtaggaaagtccttgaatccaactgtattcctagtaagtgtaataaaataaaagaaacctctagaaattgcctcaaaattcccctccagataaggaaaataacacaatatttctcaataatgaggaactgctacaggagttcagtgtcttattctcattaacgttagagtacaatagagaatagcaggaaactgtaaaaactgcagtcccctggtctttttttctaaaaagttagtttgacatatctggagtactgaatttcagcatatttgagaggcctgaatatttagttgatatataatatggctctaagaaatatgctcatgatagattggaaagtatagaatatctattgtaatctgaaaataggaatttagagaacagaagatttgatagtaggcagagtatttgaaaatagtaatacttgagaaaacctgagttgtatagtaaaattactccgtaacacctcattcagttggcttcatttaatgtttaatgtttaatccatggataaatgtcataagtctcacaagtcacgctcaccattggatgataagagaaagggagatcacattttaggtgcgcacaatctacctgtatgcaattgacgctttccatgtaagtgttgccaagttgtatcggggcaccattagtggtatgagacagactttaggagttattttggactcctttttttctattaatatatcttatattttgggggcaaattataccagtatattaaatctatttacagaataaatataaagttaccttttatattcagtttaagtttttttaaaaagtgagtcaattaagaaaaatatcaaatcatggtatagatggaatgctaatatggaaagaattatgaaggtggtgttatgactgaagtttcagaaacatcaaatgacatagtcatttgattcaacaaaacatctacagatggatgacccaatggatgtatacatctatggtacagtctattgaaatgtggtaacaaccagaaagtaaaaggtccatacattatacaattcagtacaacagggaaatactgagaaataatcgcagcttctggatcaaaagcatgggccacatggttcctaaatccagtctccccatattcaggcctcctcatcagcctgcatgccatcatatgcttgcatgctaacaggaatttcgagggaaatgccatatcttttccatttggggaagcttttcagagggaaaactacaggatgcttagataacaaaacattctttcagaaatgttcatgtgagaaatggtcttacaagtggataaaactctgtaacatcaaatacatactttttttttattctgtcactaccttaaatattaggagtagaagcaaaacttaaatttaaatctcaatggtcttacaacatagcgcatctttctttctctgtaatggcaaccttgatgtaccaatccaaaaactttgagtattctggttagttccatacattgtcagattccccacttaagtttgtttttgccaggggagagggacgatttcttagtcattatggtactattatacagtctttagtagatgcccaataagtgtgttaggttttcagagaaagattcttggaagatgtagaatgttgggcaagtaagcaaggaacagcacatggggctgcactaaacttgtgtgtgtgtgacagagaagggagtagcatcaggctaaataagctcattgtaacatggatctgggggacggtagaacacaggctaattatttctggagagttgaaaactcaacagtcagacattacattctctgatcattgtcatttgctttctgaaatggcaactggaagctatttggtagaccttacatggagggaacagtgtttcaaataaatagtagttgcctaattttacttggtttgcttttgttctttcttttcccacatttaaattccaataagaaaaaaattaaacctcttcctctaaatcccctctcccctaaaaataattagtctcacaaaacttttaagtttccaaaaaaatacatgattaattaacctgctttaaaatgccagcaatatactagacatgggacagtgctaagaaagtgtgaatgtcccctggcagtcataaggaaactgaaaagcttaaggggataactatgtggaaagcaatttattggcatttaccgtaagaggcctgagagtcattgaaagaagactaagtcacaaatgcaccttgaagtgtgaccaggggagcagatgaagggtttgttgtaagaagcagccagagcctctggcggatgccgtactacattttccaagttgtttgggtgggtcacaactgcactccaacatcctgtctgcaaatgctaaataaacaccaagttcacgtcagactagagaaccaacgtactagctaatgccatttaagcaatcagaatgcttacattattttcacttggtaattcacatccaaaataattgaagttggcacacccagaggagtatatatcctctgtgtagatgttcagagagataggcaggctggtcaactgttccttctgttgggagcaattggaatcagcttagattatatctactgtaatagaaaatattttatatttaggaggtgggaaaggttttggccttcgaaataataagagatattgacaagatataaagcttcattccttactgaagagctgttaaggattagcaaacccaagtctttgtgtgtagagatgaatgaaatttgcattttttttaaaaaaaaataaggtttagaaaacattgtgcaagggaacagccttaatacgtgcagccacttgtccaggaataatacattcaatttttcagtttaaaattccagtatgttctgatccaagggtgcctgttacactctgctgaatttttaagaggtaatttacatctctacaaccaactccaaagcatgacatttcattacatccgctcaaaatgaacagctgctaagtcatcaagttctctcaactttgcttctaaagagaaaagtttagttttagtgcttcagtgaaatacttttttgaaagaatgacttttataaaattcatttgtttattatggtaaataaacaacttaatggcaaggggtgtgttccttgtaaaggtgatcacggaatgttacccagaataacacagacatctcatttcccagagaaggaaatggttttataagttttgtgaggtctcttgtctgcttggccggtttacagtgctggtctctggagctgatccgcccctttgctttgtaagtctcagcaattgacgaggctaggctgggcgctgggcttttctttttttttttttttttttttcctttctcactgccctgcggtgttttgaactgccttcttacagacgtcatacagcccttgaggaatagtttctgcctggtgagattgaatgatagttctcattcacaaaaccctggattctaagcagggacacacagaaattactttcgcaggtaaatcagcccacccagccaaagtgtggagagatttgttccttggctgacttctttgctccacggagaggagtgttttcctgtgcttgccctgaaatggaacttccttgacagctctcccgtgttacagtacctcccggtcattttctttttctctctctctacctgcgctcttcgagtgtcagaaacctttaaagctgttactatggaattgcaaaaaagagatcaagtgactctttcactatgctggtttcccttgtgacccagatgaagaatcaattcagaattcagttcctcccttggcattgcaagacacagaagaaactgtcacttcctaacagcctagtactggagtaaattcagtatgaaggaagaaagcgctcctgcgtgttagaaccttgcccatgagctggaccgaggacaggagatggactccaggaaaattggatttcttcaagcagcctcccttggaaatggaatatctttaaaatcttctttgcagaaagacagttagaatgtattaatcagaatagttgaagacttattttcctttttattttttttcaaaatgagcattattatgaagccaagatcccgatctacaagttccctaaggactgcagaggcagtttggtaacgttcttttctctcatgcttttccccttttctcttttaagattgacgtactccttgagtatttagtaagttgtgtgatgtcgaggctttgtgaaagaaggcagtattggcggctcttttattctttattttgttcccaaactcatgtgctttaaccaaatgggtgctgattttttttttaattcctcttggactgtaacaatttatctgatgataatttttaaaggaggaaagaaacttgcagatatgttgggagttttgaaaatgaaaacttgtcatttttcagtgtttgattcagttgcttgttttcttatcttctttgcttgctgcaagcaggctggtggttgacaggctttgcccttgtctttaaaagcaataccctcacttttagcacagatgtgttagaaattaataatgttatttatatttaatcatacacatgaaacaaacttgaatttaactatgtggctaaatgtatatcaagttgcttatcattcattcatctcttatgttttattttattagaaatgattcctagtaattatatttttggttattttaatgcttttactctgatgaaaaaatatgtcagtttcaatgtattctaatgttctattatttccccaatggtgatttgatatgctaatcagcatatggcatggcccttaaggagtattttccaacaaagtaacttttttttctacaataggtatttacaaaatacttttatggctattttaggggttagtcttattttgtttttcttagtgattgattataaataactaagctcacctctttgaaatggaaataatcatacctcacactggggaaataaaagcaatgattgaagtgaggtggttgagaatgggaggaaaacaggccagcaaaatatgcattatcatgtgagcaggcaaacacacatgtaaatactcaaattatttgcgtcaggaatttagcttgtgtttttgtggataggttagcctttgctgttattgtagtgttttacagtcaaccagaaacaagaattgccccatccgcagtatttctgtgagttttaataaattatagatgaagattttgtctcttaacgttacttgccatttcttacaaaataacacgtgcaataaattattccttgagtttatttaaagaaaagattgcatctgcaaacaaatttggagagtcctgtcctttttttcctcaaacaataaatactggaaaatccttaaaatccttgtatgaattaccatagctaatataaatcaccaacatgagtaaacagaatttataatatacatgaatttaactcatttataatttataccattcctatgtgaaaagatgttactactttaaaaatagtgtttaaccaaactatttctctttttgtctaaactgccaggagatgtattttcaaattcaggtttcaattggaaataatttgttcatttcaggagatgagtaacattgacaccctttacctctctgagattatcatagtctatttttatccacaattattatattttttgttttaaattgtatgggatattttcataagtcaagccacaatttaaaatgcatttttaaatattttgatttgttaatgtgtgtatttttccatttaactaaaaatattctccatagacttggggatagaatgatttctgtgtaagaaataaatctctctctatatatgcatgattcttagatttaactacacactatagaaacctctccagttattaatcttacatctgacttaataatataaccgcttgggtatatcactgcagctgccaaaaaatttggcctgagggtataatcagctgtagtaacagttttgccattttattatccgtctatcagtcaaatattagacacatctattatatttatttatttaattacatgtataaaatcaatatagattatagatttggtatatagagaaaatatatgtttgtgtgtatatatatgtatacacatacatacacacacacatgtttacttgagcattaaaaaaacccaaacggcctctcttcttgtgcctctgcacataaaggccacaggcctcaaattgctcagagggacaatgttttctcaccagtgttgctgtctgcatttctccaccaccaccctaccctcattccttttcagttgacttcccatgagagagacctaaaactttgccatttatctctttttcagatgtttatttgtttccaggttgatctccaaaatactttgttcttgggacacatctttctggctttaccatcttcactctgattacataaatctattttgtgttccattggtctactttctccaaatctgtctactgtcctccgggattccctaaagccaaacattacgtttggaagtttgttgtattgtgcaagaatccaatgttttggattacttctttacctttttctatttgtttctctccaagtatcataaaaagcagtccacactaacttgtccttacagccttaattaaattgctatgagatattcacattttaaatgggatttcatggcaaacttgtattttatacccttcctcttattaaaggtcagcctgttataattaaaattttattaatttcaagacaaaatacaaataaccttaaaattaatctatttgtctctttgtaacataggtgtccaaatttagggtttatttaataaaggtgtatactaggttgcttttatttaaggaacagttatttatatgccacgttctagcagaaagtgattatagtatttattcttaagcattattttaaaaaaatgtgcctgcatgaaattgagaaaaactttatatattttcttatgctcataaagctaataaaattagcagattcattgattgcagaattgtttgcctttcttgcatatcttaaattcagatttagtcagttgttatatactatgaaaatattaccttacatattccttgatatctctttaacacttttataaacatttataaacatttcccagggatacttctcattaatgtaattaagacttgtgatttagtttaagtaagtaaaacattattagtcttacaaatataaatataaagagaagtttagtcaatggaagtggacttttttctttcctgctgacagaacagtgtttaggatttatgtgttacatgtaagatcattcattatgtaatctgaaaataaaagagatgctactgttcaaaatatgactgtggttgtttttaaagcaaattttaaaattggttattgtatatgtaatagtacttatacttttcattataagtattattatgtaataagtatacatgtaatacttaggtttgtagatgcagaaaaaattctggaagactctgtccaagcttttggtagtggttattttttaggagtaaaaaaaaaaatggtaggagtgaaggtaagggggactgcctctcttttcttcactgtatttgcatattgtatgtagtttttatcaataaagtattatatatgaaagtttaaaatattaaaaatatacctactatatgtattagcaagctcatctttatatatgccaatatctacttagacattaaaccacaatttgctcaggttatataatatgcaaatgagtatttcagtactggttggatacaattttctgaattttcttgcaactctgaccaatggaggattataatttttttattagctcttttctcttaaggttgtaaaaatctagactggcttagcattcttattttggcctcatgatcacagtggaaagcattcatataagctaaaatgtccaattttataattgagaatcaaaaagatggaataacattaatatgttggaaggaaaataacccattaaccccattattccatcctcagttattctcattttcaacttaccttacatatcttaaatagctgtaaatactatttctgtactctgcttcttcatttaacatatcaatatttttctatttttggccaggcggcgtagcttgctcctgtaatacctgcaatttaggaggctgaggcaggcagatcgcctgaggccaggagttcaagaccagcctggccaaaatggcgcaaccctgtctctactaaaaatccaaaaattagccagagtggtggaacatgcctgtaatctcagcttcttgggaggctgaggcatgagaattgcttcaacccaggaggtggaggttacagtgagccaagatcgtgccactgcactccagcctgggtgacagagcaagactctgtctcaatttaaaaaaaaaaaaaatccatttttctaatacttatagctttcattttattgagtgtcttatgaaagagctctatcaagaattttacatatatattatttagttcttattacaatattgaaaagaaggagttgttaatcctaattttacaggtgagaaaatgattccgtgagatgaaataacttgagcaaggtcataggctggggtaacccaagtctgtctacctcaaagaacgtgctctggttcttcagcttgttgccttcctctactgtggatataattatctttttaatggccataaaagtgttcatgttgtgaatatttctagatgcattacagtatttggcagttttcttttcggaagtatggtagcctatgaaattcagggttgacgttgttggttgttgaaaaatagctttgtgaaagactgttggttgttgaaaaatagctttgtgaaaggctcttgcagcttgtagaccattatattctctactggtagcaaataaggtcctctggtctttataacagacaataaagaacaaaaggccaatgcctcacaattttgaatagattatctttccaattctattaccaagtttttctgttctctgcaagctctgtaaggcttcaggttggaaacaagtagtacatatcagattttgtatgacatctaagatcagctttgaaaaaaatatgcaatcttccttcctatttcttctatcttagaaacttgtaaatacgcaaacaaatggaattctcatattttctgcctgtgcaatatatattatgatttggtttaggtatgtgactactgtcaaagttggttcagggttttgagcatgaggtaaactttttttggtcctattacccaagttagtgatgtatctgttatgaaatatacttaaagatatacagcttttagaaatgattaagataccttgaaatatttgatgtatttaaaacataactagaaagacacagagtggatcacagataggtttactctttaaagtcatgaagtatgagattccctggaaaaagccatttgtccactgtacttctaacatgctctgtgtccctggaggagtcacctagtccctctgaagccaagtctactgtcctgtaaaataaaaggggcaaggcaggtcaatggattttaaacacgtttatttcaatgggacattttttattaatgaaatgtgagttgaagttaatataaatgaatatttatactgtaatttttagatataaaatcatatataaattcaatatatagatataatttttaaaaacatagatatgtgtgaaatatataagtaaaaagtataagcacacataaaacaataaaacagccactgagtttgtacatttaccccccaccccaaattcaaaccctctccttaaaatacctctaaagactttaggattccaaggaatattgtttgaaaaccactaagctaatgactgttaagatcacttacagttttactctctgcagtgctgccttaccgcgggagagtcatttgtgtattctgtatctctatatggattgggataaactcgtaggtaatgtagcagttcaaatacctctgccttataagaccttgaagttatgtaacttttcccacttctgagatatcacagaagagttatcactataatagttaagatctattcattttatttagcatcttattttttacaagtttattttaggctcatctggaatgagaaaatcatgcactaaacactgtatgatgcatagctgataattcaggaagtgagtatggttgttggtaaagaaatgctgaattggtatgaaattcttcagaagcaagacgcttcttttggtatttcaaaatggggttctccaccctctttttctatcatgtcaactggctgtggttatgtgtgcaataatacttagtcctgactgcaactcttttttttttcttccccacggatctgaggcacaccatggttttggccttatcattaaaacttgccttttaggagaggtaaaggaatagctcacttagtagttcctctgtcaatcattccaatcatgtagtgaattctattgaatcagaagggatgatgacatgaaggtaaccatgagtatacgaatggttagtcatggatccacccaaccattactagcaagattgagaaaagtagattctaagatgaaactgaaggggaagaatattaatgaggcctttaaggagtttttaagctttttagggaaagatgctgagcgatatgtataaatattcccaataatactaatactaaacatatagaattgtcaaagtttagataaaggtatagagaatagggcctgagggatattagctaggttggtaaggaagatagtcacaaagaaagcacagtcttaataaaaaatcaatatagattttcttggaagcctttccagaggtgatccaatatctcaaaatataatacaggggttgaaggtatattagaaaatggacagaagtaaggtatacttcagccacaagcaccaaatctctccagggattggtgcctatgggaagggctggggtaccacatggggcacaatgacagcaagcctgggtgagacactgttaaatataactgtgtacaggtaactaactaatgagagcctgtgccagtgatatgtctcagctctcaaattgcctagttctttgtcaagtttgacctaaattagaaagcatttcaaaagtatggaaagtaggaagaatgccagaacctatggatgcagttttttagcatgacaggggcaatattgtaagtatttattatctgtcctaagccttctaaggggattggctccctaatgagcatcctgggtgatggctgaggatgcgaattagagaagctaacagaagggtgaactgctcttcagaataagagttagaaaaacacaagggaatatttcaagagaagagctggggaagtgtggcaagaaaaaagagattatacagagaccaatatggaagaattccagcccagtttgaactaagcatccaccatctagcaccctaccctgtttaataacactggcaacctctgggcaaaagctgccattaatgaaactcagtgtagaggacatttgccccccatctcagccctaagaatttctgccatagggtaaagggggtcacctgcaagcccttccatttccctactacacatgaggaagaataagaaattagaaaactagaaactaggtgtagaatgtatgcacaccaaggattgcatcttccaaagtacccttataggaagcagtcctgttgttttaaacccacagagttaggaagttttctttatatctaatacaaatcttctttgcttaaattctaacccatttcctcttagttgtcagtagatataatgagagtgaatcaatagataaaccaattcttctttatggcctttgaaaactgctagtgagtgacttcttggtcttttttcatttcatattgcaaaatattcattctaaattgtaaaatagatggcaccagtgtgacttgttaaaataaatgtttcattaaacataatttcagtatgtaattgttttcagacttcctagagaaaagtgctcccgttgtatctaattctctttcttgtttaaaatacatcaaagatgagaaattgagctctttttagtgaacttgcttgagacattcatatggaatacagaaaataataattcctaacattcaggatgtcattccattgcaatgtggcacagagttttttctttgcatcaaggaatttatatgactgatactattttagtcaggataaattactgtaaaatgtgtccacttttaaccaatggcattctaacatgggataggcaacagcgggctgtgatttttgctctgatactgcaactttgttatagaatagcaagtaactgattggcagctagatcaccagctagctggagaaagcagcttctaggtctatagtcatagttggagtcataacctcattaatgatagctacaatgtattgggcatctactctttgacagacaatgaacttagtactatatacagttgaagcaactgtatgaataaactgtatgaataaaacttgaagtcgcacagcttataaaattacagtgctgcagaaaaatcttggtctgtcgaaactacatcccatatttgttgttgttgttcttattgttttgtttgcttttcctcactatctaaactgctttggctacacatagttctgtttcatggtattagaaaagtagtcaacaagctgctacttatacttttccttcctgtcctagactgttcaagtttcttcttttaatcttatgtatatcaagaacatgtttgcctatggtatttgtctgcctttccccccaagatttgtatacaagcctccaaccgtgagccctagagatatattgagaaatagaacatggactttgacacggctccattccttggagatctagctagttcctgactcgttcagcttattgactctcttcctctggtcagactataaattgcagttttccttctctctggcatttgaccagttagtagcaccataaaacctttgaaataaaagagaccacagagaataacctataatctgattttccccacccctaaccccaatgtggagctggaaacattttgctagtctttaacatttccagtcaagtagggtcaagaaaaactgttaaaaacaatgtcaatgcttaagtggtaaaaagatttgttgaagaatatatatatatatatatatttagagacagggtctcactgtgtttcccaggctgaggtacagtggctatttacaggtgtgatcatatgcactacagccttgaactcctagtctcaatcctcctgccttagccttcccagtaactgggactacaggcatacaccaccatgcctggctggagaaatatttttttaacttcaaaaatgaagtttgagctgaaaaagagagctaaaaattagtctgtcaggcaaatgtgtgaaagcagttctattataatttgtattgagctataatgtaattcctaaacttatgtcatatagctaagtaagtagctgtaattcgcatcttgaaattttaaatttacttctttcctctcaatatagtcttcatctgaattaaaaattgtggcaatttgtatttattgtgtacttaactatgtgccaggcactgtgctgttcacttgacctaattatctcattagatcctcatgatgaatcctagacagtactcattagtcttattcctcagactgaggcctaatgaagtaaagtggcttgcctaaatttgagtggcaaataagataatttcatgattcgcatattttcttaattataaaatgttacctttagcaatgatgtatatgttaatatgttcaatgagttgatctacctgaagtgcttagcacatggctggctccttgtgagtgaccaggaactgttagcttatattatgcatttttgaagtttacacattggtatgactttctaaataatcaagaactctaaatgtgaaagctgattcattttgtaagggtttcttttccataaggtagtcttttttaacacagtcagaattaagcatttatatagagctaggtattccagataaatcacgttaatagtgtgattcaaagaagacacactgctatctaggtgggtcaaagaagtaaactacttagtggaggtggcaaaataagaagtggtcagtgggaagctaaaccacctctgatttagttatttaaaactcaatgagaaccctctaaggaagcacaactaggcaggggtttcatctgaaaggaatggtcagctacctgagcattatctctaggtgcacctttgtaaagactttctccatgtatctttcctactgggtgccaccctgtggcttggtcctacggtaatcacactgccaggcattctctacctctacaaatcccttactcttctagtcctaaggtgcattcctggttgtgtaattcacagattattatctccctggagctgagcctcatcatctctatcagaccagactgagaaggactcctttttcctttgtcccgccatcccagctcagtgcagaaggcttaagatgctttctccatcatttctaaagaacaacagacaaaaatagagatctggttaggtctgttcttgtggcgtgaagtgttaggatgagctgaacagccacaggggctagaaatgtcaagaatgcaatacgttagagcaggcatttagcattcctgtctctgatatctactattttattatgagtagttaccaaaacaaaacaaaacaaactgtaaaagcattattttgttataattaacaactgcacattggattaagtgtgattgagggtggagttcaccagcttgggaaaaaaaattaaccattaaagattccctgagtgttttgctttaaaaagagatagcccaattacttttctgtgtttcgttaagagtctactagtatatgaatcagtaagagcttctagggtaatataaaacacacacaaaaaagcaaatttgatgttagcagacaactttttaaaggtattcgtgtaactgaaaaaatcattttacgtacataggaatgaaattttatgtttacctagaaatatatgtgaaatccctccattattgcaagatctttttcatgtaaatatcaaaagaattagacagtctgcattgtttaaaaccaagatagctagtctttttaatctatgggcaacttgtaattacgaatagcagtagctgcctggaataatgtactgagagctgcgttggtctcagagaaaatgtgctgtgatccattggtgatctctgccagacagaagagggacatagtgtggctgcttgccatttaaatggccttgatgatctcatcataactctatatatctaatctcaccattaaatttgcatgcaaataaagtcattgtagcagaaacaggttttatgcatacatacaaatacatgtgtattttttgatatgttttgtctatttgtcacctatgaagaacatataaatattgtaaacagaaaaactctttttggatgttgcaaatgcaaagaagaaaaataagtaattctaattttcaaaggtcacccctgtaatcaccacccagattaaaaatagtaccagcagccaaaagtcacctttatgcccctttaagcccctgcccccacctactaaaaataatagtgatcctgattttgaaaatcacaaactttttaaatttcctgcttttgaattttatataaaaggaataatatagcatgtactcttttgtgtttggctgtttccctcacccccttgcaaaattatgtttgaaagatgatcccttgttgatgcggatatggttcattcattctcacttaagtataggtaattaagcaaacttttgtttgagatacaaattcagggtaaaaatcagattttctatttaaataataatttggtatatatgactatttgagcattttaaactgttgtcattttacaataattattttagtatgatttaatatccaaattctgttgcttagattcaccctcagtggacatttcttctgaagggccttcctagacttccccaattagaattaaaactctcttctctgtgctgtcatgaaaccttgtacatttctctaactcttgaaggattacaattattgtcttctgtctcacgtacctctcctgtgagcatgttttggagtagactgggtttgctcatctttgtagagcaatgaacccctgttcccagcaccatgcctgctccatcatgggcattcaacatctgtcctttgcatggaaagtagaacagtgagttcttccatattacaaagaatattacagtcaatttttatttttaattttcttttagtagatggcacttttcaggagattgtactgggtgagttgtagacacagtagttactctttatggcaagagttgtatagtatccgggaggatttttgcctcttccctgtggctttctttcacccttagtttgccaccaccactggcaattctaatctaggcacaccttccattgcctcctgtgtttcccattctaaaatatatacttccaagttttcctctatattttctgactgctcgaatgactcttctcgtgtcataaactagtaaagagtagtgcatatagaaatgctgataaatgtgttgcacatggttatcacccgactgacatgctgaccttctgactctatcaatgggtgatttttatatgaagccaagaaatctgttggtggtaagtactaagaccaccacttcaggctcactctaacctcattgtgtgcatcttgaaaccccacacagttgtcacatatgagcagattccacaggagggatgctgaaccaaagtgacaagcttgtcctggagccctaacacagggattgacccccgaccttcaaagtcagggaacaacttagggttggcttaccttcttgtattgtgaacttttccgattgtgaagccagcttttagctttaccacactcccagacttaaatatttggaatggcaagaaattaggcttaaaaaaaaagaaggaaattaaggcttaatccttaataatgaggaagtaatttgttttagtattgtacagaaacattttctagctacctgatcatttagtctagttctatagcttaaaatatatagtccttaaagaaaagttttatttctgtgggtctattagttacaaaagtaaaggtgcattttttattgctttatttaagtgtttattaagcttgttctgccacaggtaccctgctggctgttagagagacaatggtgaaatatacagcactcggcttcataaaatttatggtctagtgactttctgaagtatttctatagggcaggagacttctatttcaccttctactatatccttggaatagtttttactttcctggtaggagtgtgcatttatataagtgtttcagttgcttccagaaatccagtggtaaacaacataattttaaaacctccctacttgaatttggggtggagtaatataaaataaatctggaatatttgattttttagaccaaaatactttccctgggttagagagatattttcttttcttactggcctggaaatccatgccattttaataagagatatttttattctaggtaaattgtttacttaatcacctcctaacaaggctgtgtcagccaagttaaatatttaaatttatttttatttaaataaattttaaaaccaacagatttctttctcattttaatgaatttagcctttgagttttcaaagataaaatatacagagtagaacattttaatgtatctgtagagagggaacacaaaaagggcacatcaggaaaaaatagttggaaaaaagtgaattttatacaaaattaactcataaaatgaatataaggcattatttcacttattgccaaaatctgtctttacagataatcttcgggagacctttatttttataggccctagttaaaatattttttgaatgcttgaggctctatttcactaataagagaaataaactttttctttctataaataactgctactagcttgtttgtcagctctctaaataaactcattttactattactatgcttgagtgctgttatatattcctttgttactgtgcataatccctggctataactgcattaataagtaaggccattacatcaaatagggatctaacaaaaactttcgaatggactatcaaagaccagattcaatgcaggaaatcagaaggaaatggcatttatgtcctagtgtagttcagttaaaaggcctgcccttaaggattacaactgccataaaagggcaccatgcaagaatggaaaacctgtttacaacaaaatatcaaattattatctgactttcacaatgaaccacattattctatgactgccagtcatacatctggactactataccatttgtgtgcagttacagcagctccagttctatatggctagttttgaacttagtctgactttaaaacccatcccatttactatcctctgctttttttttttttttggtgtatattgtgggaaattccataaatgatttttataaactttagccagtaatcgggaaaaactgtaagattttgtttgtaagctttataaacgttacttataagattttaattgaattctaaattaatttctaatttgaacctctcccttctcttagctttatatgcttggtcatccctccttaagtaattagcttttttgaagctttgttttttttggtttttcactgtttctgttatattgacgatttgactttcttataaattgttagtaatttcctgaataaagtacagaagtttatctttcaaatttcccatggatcatttcttaatagtcaaacaattgtctaaatttccaatacacaaagaaaagttttagctaacttacttcaataagatggataatttgttcaaagtgccaaacacatttgctttcgtaattcatgccatttgtgtgttaagtgtataaaagagatagagaaagaatataggaaatgtaactacacatgcaatcttgggctttccaaaatgtttaaagtaccaaattcccttggtgccaattgctttaggcatttcatcttcactcagttgcatcctaaatatagcgtaggtgtgacataccctgtaaatttcaaattcacataaagaagtcccagccttcgaggcaagtcttaattgaatactaaataaaaaccttagtgtcttctgaaatgtttctgaataaatagttgctttacagtctttgatttctatgttcgttagtgtccaaattcagaatgggaaccaacttggggagaaaaagaaaaaaagactctcaggacaatctttttaaaggagtaacagataatctattttggctaagacagggtagattcaggtagtcagataatagaaaggggagtcccttgtgtatcaactgatgctggaatttgtgaaatcctataaagttttgtagaaaaaaatgttaaattcatggaaacttgtttggtcataatcctcacagtttctaatttagtataacatcctgaataaattcattcagaccgacggagagaagaaattattatttgcaatatgtgaatttctgactaataggagtaatagaaaataattggtcccttaggatatttctgattatatatgagaggcttggggagggactctgtgtaaccgttgcttttaacccttgtttttgatgggtaaatagaacattaatgctacatgaaagatacttactctggcatcctcaagagaaagtaggttcttttttttctcagttatccaagaaacttttaacaattctaaagaaagaaataaaaagcacttagttttcagaagcatgtttcagcttcttgcatcaggagtaggccagatggccatgttctgtatggctttataaatattcctttttgttccatgtaaaagttaatggctagttttaaaccttggtatcatttcgaagtcagaccttatgtgcttaacttcattcaaagtatttctattttgttaggctgtaggaaaacatagagctgagctattaaaattccagggcagtttggaattgccaacaatatgtactggagagatgggggtggattctgaagtcaaatgaatttggaactcatcttcttttacatgctgggtgattttggacaagggggaaaagctacccatagggtttctgtgaatgttaagtgaaataatacatggaaagtgcttgaagtaatggtagggacacagcaaaccaaaaaaaatgctagccagtttattattagaagggaaaaactcctattaatattttcttgtttatgtttgtgttttcatgttagtcttaaaacaagttactgtttgagaatgtgagaattttaaccatttacaaaatggtgtatgatatgacatgtatatgatctctcacaagtgaaatgataatggaaagtttactgaaaatgtcttaacagttctaggtaaaacttaatttttccttaatttgaaaattaataaaagtatgaattagatttaatctaaatttattattctgttaaagtcacatgaatgtggaaaaaaatcagtatcacttctaactaaatctggccttgaaacttctttgacatagtcttcttaaaatatatatatcttatattctaaattgtatattatttagaaatatgctatttctaaactgaaatgtctgatatttctaactgatatatatatctatatatgatatgatatatgattatatatatgttatctatatgatatataatatatgatatatatttctaactgatataacaatgtatctcagttcttagagatatgtaaattatattttaatagtagcctacaaagatgatacaagaagataagaaataaatatacttttatatataaaatagttcaacagcaagattcttatttagaataattttctacagttttatttagggtagtttctatacagaaaaaatacatattttatctcctgtctgtgctaggctctggagatgcaatggtgcctccctcccttcctggagcttaccaagcaaaacaaattcactaaataaaattattcctaattgtgttttaagtccagtgaagagaacacaggagggaccgagttaaacagtgtgtttgtgtatgtctgtgtatgggtgtgtgtctgtgtctgtgtgtctctttgtggctgtgtgtcctagagatgtactttagttggagtggtcagggaagttgagaactgaaagaaccagtcaaacaaacattggggagaaggggattatagcaggtacaaaggtcttgaatatccagcagatatgaggagcagaaaggctatctttttcaatcacttaaaaaggaaaagaagtgaaagattgctgtcttaagaacttaaatttatatggcactcatgtatagatttccagtgaaaagttggacaacgtgaaatgatgggtttcctacctacaagtctccagtgtttgtctttgactggggtgttttctgtacatatctgacctgatttctgttgctagcctgtcttcccaggggccttggtgagccgaggtcagagagagtggacttcacctaggaaaaaaggaaaggcttctgacataaaagtgcccttgaaaatgttctgctgctgtaaatcccttctctttacacaaagtttaagaccctcccaagagtttgacttgctaaactacaagagcatttttattaggtgtaagatctcactttgactttaagtagcaagtgacacaccaggcaaccctcgctgaattctctcttgccataagtgcatagatttcagtgttctaatgcctctctgagctaaatttgcctctgatctgagttctaaatgtaattggatagtagatatatgtgagtaaaaaaaaattctaccaaatggttggaatagttttcccaaagaatgtaatattggccttcagctggtaataggatgtgcctgctggatgaatgacatggttgatgcaaaagacagatgtaagccgtggttccccaaactgcagtagggatgagcatgacagccacacatatcaaaggccaggtactgatattcttactggaaagactgctcaggatgtatgtggtgttctttttcctggccacccttaaggagtttatgaatgggttccatcagcttcaaacagcaaacacagtttggcctgtatgaactgaaacccatcacacatcattgccacgatcattttcctcatgtatgcaagttctcaagtatatttttggtcacaaaacagcaaaatcatgacaaaagcaacaataacaaccaaaagtaactaaatacgatttttatttagtatgaaatgtattgcattgtaattatttcaacatcataacatttattaaagatgtatgtatcactttattattctatgctcatcccccctctttatacaaaatggagcataatctgcacattcattgttctgcagtttgtattttgcacttgacagtatgttgatacaaagagaagctacttgtgttgctctggaagaactttattgagatataactcgtatgccatacttttcatctatagaggttatataatgtattgatttttagtatatttacgtagttgttagttaatatctaccattctttgaccataatgaataacagggttttctctgcacagatatgtccatttaagtaaagatgccaatgcagctaaatagaatcactcaaaaacaactccaaaatgagccagggagagtggagggaaggaaaaggaggaatgcatccaaacatagccctacgttccatgaacactcagtaacatcatcaaaacgtgatgcaattaaattttaccaggtttactgctgtcctgatgctttccaattttttttgacaacagttttgcctttttcaaattcaaatggtataattggggcttggtagttgatgtttatcttaattgaaacagattctcttcatccttttgctctgagactcccactttgaggctgaaaggtcattttaaatctgcagagcactcgagaagccacataatgaattcaaacaaattcatgcctattaaaaggaggcttctctttctcaacttccagagcttacatagaataaaccatttggtttttgtctgactttcttttaaaaggaagttattgtgcttcctttttaatgctctaactacagagaatggggaaatcctgttttcatttattcttatcagaaagaaagtgtattttgctcagtaattgcaataaaatactactggggttacagctactatacttgtcaacaaatttaagggatattctttagctgcattactttaaggatttcttgtctatcttttatctagcaacttcattttttaacatttactctatgtacttgtgtaaaggtgcaaaaaatatatgtacaaaaatgttctgctggagtttttgtaacagaacactggagaaagcctaaatgtcaatcggtatatggctgattgaacaactgatgcacaactataagacaatactgtgcatctatgaggaagacctctctagtatgacactatctccagatgacatttactattgtattatttttatactttgaaaagaagatatgcacactcccatgtatccattttcactagttttctttgtatatactcttagagtttatgtaagtgcaatgaaaacataaattctattctcttcctccctttttaaacaaaaagaagtataatctgcacattcattgttctgcagtttgtattttgcacttgacagtgtgtcaatacatagagaagcttcttgtgttgttctggaagacctttgttgagatataactcacataccctactcttcatcaatacagggtgtataatttcgtgatttttagtatattcacacacttttgcaaccgtcaccaaaatcaatgtagaacattttactaccactataagaaaccccttaccttatagttatcaccctccatctcccccattacctgctccatatcacctgcctcccttccaccccacagctctaggcaacggctaatctacgtttttttcctctataatttgcctactctgaatgtttcatataaatggaattatataatatgaggtcttttgtgacttgcttctttcacttagcataatgttttcaagtctcattcatgttgtagcatatatcagatttcattttttaggaccgaataatattccattatatgaatataccacattttgcttatttattcatcagttgatagacacttgcgttgtttcactttttggctattttgaaatgtgctgcaatgaacatttatgcaaaagattttgtgtgtgcatatattttcctttcttctgggtatattcctagtagtggaattgctgggacaaatggtagctctaagtttaaccttttggttattttccagtgtatctgcattctcatgtttcttacagcagaaagttattctcttgaatggctgcatcattattgatgtagtcaaggtgtatttttaagtggaaaagttaaggcacaatgttcccagttatggaaaaatatgctaagactgtacatacataaatatgtttcactcaaaagcatctttctgcgtatgcacttaaggtgatggtagaagttgctagctttgaggaagaggtggctacacgtttggaatctgaggtagaagggggctgagtactcaccattttaaacttggggaaattttactatgtgtgctaattaatttttcaattgaaaatttgattcattaatgtaaagaagaagaaatgtaaaaaataaaaaagaagaagaagaagaaatgtattttcctggactcctctgaccaatgttggtcaggccaggggcttcttgacctgtgctttgtttgagtcatccggcaccatgaggtgcttagtgctgtacaagcactcttcttgccatctgctctgcttgacatcatttttagttattaggacaaaaaattaatgactgcttttctatctttaagccaagacaccatttaaaaaacagacatttagctcttactctaaattagtgtttcttaaatgttttattcaaatcaatccacatcaaaagcaaaataggagggaaaactagggtagacatctgagtgaaccttgggattgagaaataggagggtggtatgtgaactaatcattaatggtattagcaaatagagctgggcagtctgtctgaagtgcttcccagttttttgtacattcttctccaagtatcatgtgttggtgactggaagagggagtctttactttccgcacagtttccatcatgtagctctggaagggctttgtgtttgttctcatctttgcttgagaatcagctgtcttattttgggcttttctattttttaagacaaaacctacctatagtggttatacatgaaacacaccagtagatttgatttctgcctttggttaaattagtttgccttattaaatgataggaaagaatcaaaattcgtttgccttatagatttgttcattcttatattcactcatgtattcattaagcatttatttattcaacactcctatgacatcactcctcactgagtgatgattccttctagggtgccatagagggcttgatttccagctggaggaagaataatttaatatcctttttaatgatcaaaattctaaccaaacccaattttgaaaaataacttgactttgcctaaaagtacattaagaaagatatagaaaagagattctatgaaaatgaaatttaataatgtaaaataatttggttttatcagaaattcataaacagactttacttagagttaaaagtccctttgagaggagtaaaatcattaatgaaaaaaatgcatacattttcttcaatcatcatctatatcccatcgtgataatgaggagtacgctgtgtgtagtgactgtgtttgcaggtggagggagtttgagtaatggaagtaataaagatgctcccagaacaagtaccgcatccaattagcttgccaattaacaatctattcctgaagtatttgtttatgaagatgattttaactagagagaagtcatattttattttgtttatatataaagatatgttaatcataaaatgtattcctttcaaacagttatacatttttcctttggcagcactattgtttattttaaaggaaaagacagtaactaatcacagcatttttaaagaaacaaatagagattatgctgctgtaaagccagcataaagccatttttccaaatgtcaacagagttaacaaagaattttatgttgtaaaaacctcacagttgcctagtttactccctcatcaaaaaaagagggggcaagattctttgacatttttatgtataatgtgactagagaatgtgacttcagtgatgatgatgatctaattgcaatgctaagaaccatggctgggctacgactgtgtgtgcacgttgttatgctggggagcaagggtacctaggaaagaaagcaataatgaaagtatcacttgggtatttgtttatttctggatcttattctatctgctccatattatcactttggcatttaaaatctagatgatggctgggtgggtgcagtagctcacacctataatcctaacactctgggaggccgaggtgggaggatcacttgagtccaggaatgtaagaccagcctgggcaacataggaagaccctgtctctacaaaaaaatatttttaaaaattctccaggcgtggttgcacacacctgtagtcccacctactcgagaggctgaggtgggaggattgcttgagactgggaggtcaaggctgcagtgagctgtgattgtgccactacactccagcctgggtgacagcaagaccccatctcggggaaaaaaaaaacccagatgatatggttaaccatattcagtcattattcagttattagaaaataagatttacaaggcatccatggaggggaaaacaattacacacctggttagttgggctgaggcttgcagagataaaatcacctgcacactgttgcagagccagtgctccaacctagacttccggacaccaaagcctatggccattaagcactctgctggactgtatcttggatagtttgctttatggggaacgtagtacaactttacaatacaactttaaaaataaagtatagcagagtagcagtttgtccacagtcaaatatgaaatatgtaaacatttcacaggttctttttttaatttttattttaggtttgggggtacatgtgaaggtttgttatatgggtagactcatgtcacaggggttggttgtacatattatttcatcacccgggtattaagcccaaagcctaatagttatcttttctgctcctctccttcttcccaccctccctgatcaagtagaccccaatgtctgttgtttccttctttgtgtgcctgagttctcatcatttagctcccacttataagtgagaacatgcagtatttggttttctgtttctgtgttaatttgctaaggataatagcctccaggtctatccatgttaaaagacatgatctcattcttttttatggctgcatggtattccttggtgtaaatttacctcattctctttgtctaatctgtgactgatgggtatctaggttgattccatgtcgttactattgttaatagtgctggaatgaacattcgtttgcctgtatctttatggtagaatgatttatattcctctgggaatatgcccagtaataggattgcatggtcaaacggtagttctgctcttagctctttgaggaattgccacactgctttccacaatggttgaactaatttacactcccaccaaaagtttgtaagtgttcccttttctctacaaccttgctagcatctgttattttttgtctttttaataatagccattatgactggtatgagatggtatcttgtggttttgatttgcatttctctaataatcagtgttattaagggttttttcatatgcttgttggccgcatgtatgtcttcttttgaaaagtgtctgttcatgtcttttgcccaccttttaatggggttgtttgttttcctcttctaaatttgtttaagttccttatagatgcaggatatttgacctttgccagatatatagtttgcaaatattttctcccattctgtaggttgtctgtttaactctgttgatagtttctttggctgtgcagaagcttttaagtttatttagatcccacttgtcaatttttgcttttattgtgattgcttttggtgtctttgtcatgaatctttgcctgctgctatgttcaggatgggattgcctaggtcatcttccagggtttctatagttttgggttttatatttaagtctttaatccatcttgaatttttttgtgtgtatggtgaaaggaaggggtccagcttcaatcttctgcatatgggtagccagttatcccagcaccatttattgaatagggagtgttttctccattgcttttctttagctttgtcgaagatcagatggtcctaggtgtgcagttttatttctgagctctctattctgatccattggtctatctggctgttcttgtaccagtaccatgctgttatggttactgtatccttgtattatagtttgaagttgggcaaggtgatgcctccagctttgttattttttattagaattgccttggctattcgggctctttttggttccatatgaattttaaaaagttttttctagttctgtatttcacagcttctaactacattctattgttggacatctttatattttatccaaataggaaaacattaatttaaaattcttgtcatataatctacaaaatatttatattcaaggcacaatgacccttacatattctttttttcttttctttctttctttttttttttttcgaggcaggatcttgctctgttacccaagctggagtgcagtagctcaatcacagctcattgcagctttgacctcccatgcttaagcgatactcccacctcaacctcatgagtagctgcaacaacaggcgtgccccaccactcctggcttgttttttttaattttttttgtttttttttttgtagagacagtgtctccctatgttgcccaagctggattcaaacaatctgcctgcctcagcctcccaaagtgcttggattacaggtatgaaccaccatgcccagcccttaaaatagtttttattataaaggcaatttatgtgcattctaggtttctttaaaaacctagcaagaggccaggcatggtggaatgccagaaatcccagcactttgggaggccaaagtgagaggactgcttgaagcctagaaatagagaccagcctggcaacaaagcaaggccctgtctctacaaaaaataaaaaataaaaattatttttttatggtgtgtccctgtagtaccagctctcaagaggctgaggtgggaggattgtgttcagggtgcagtgagccatgattgcaccactgcactccaccctgggtgatggaacaagactcttaaacatacacacacacatatacacacacacacaatacgacacacgtatagaaaaaataaaaatacaaatataaatttctcataacctcaacacactcccaaataatcactgctaattcttagttattttcttctattctttttccaagcaagtatgatactaatagcaattacctggattgtacagttttaatttctttttttaatttagcattttatcatgagcatttttccatatcacttaacattatttcaaacattacttatatggatacaaaatgtttcaccctaaaaagattttgtaacttatgtatttgccaattattggatattcaggctgtttctagcttttcccaattattaaaattatcagcaaggaacatctttgaactgaaacattggcttatctctgaatatttccttagtaaaataactatgtcaaagaatatgactattttaagactattaatatatgttgcaaaaaatacttctctaaaggttataccaggttacactccaagccacactgcttgagagttctcatcttactgtgctgctgcaggaaatgtttttcattaaaaaaaatctttatccacatattaggttaaagtggtatttcagtgttgttttacttaacacttttggactactggtgtgaataaaaatggttttaatatttttattagccatttatcttctgttaattttctgtttgtctcttcgcttattttctattggggttgcatagttttttactttttgcaagagttctttatgtattagatagatgaaccttctccagctcacatttattgtaattatatattccaatttttagtcccctttttacttttgttcatggtgttttatacagtcaaatttattgattttttttcttttgtaacttctttctttgctttaataatttgagggcttttatcttaagagtagataaatgtttagctacattttccgtatttgtgattttttaacctagctcttaatctgtttggaatttatcttaatataaggtagggatacaagtttattttttcccactatacgtctcaggaccatttgttacatgtgccctactttgcttattgctttgtgtcacagataaaattttatgtatcatctatcatgtgtagacacctcagatataaattacattttacaaataacatctcaatagaaacaagtagaaaaaaaagaactctggtgcaacccattgagagaaacatactacattacaactataacaatgatgtaactaaatttctatttgccttctaaacctttttattgcttgtagccatttgctaactcctgaagaaacttttaccttttcttgtcccagggagttgattatttaattacagtagcataagacaaaatgataaggattggaatccgcaatgagccctttcactgggatgaagcagaggctgatgggactgggtggtaggtgggtaaggtggcagatagatgcaagagcaggaaccactcaccaggcactaggaaaagctccatctagccaggcatattggcaatagtgtgccctgactagtctttgggggcaaaacataacagtctcctaaaaagtggctcagaacaggtaattcctagacatatgcccaggcgtgaacaggacaacttattgaggtatggaaataaaatcttatattttttcttatccgctcacaaattttctttttcttgtattttgtaaaatagataatattttgacataatagtgcaagaacataacttattgaaaataaatatacgtaatggaggtgcttgcacttttttttttttttttttttttttttttactaatagatacggtatccaataaaattggtaatcactggtctggatcatgtgacttcaggaagctctatacaccagcttgcagttcatggatgggacaggaagagagtatcttaagcctatgttggaaggccaggtggactggagtctcagggacggaagataagcacagggaattaaagcagaagccagtagtaatcagagataagacgtatgttcaagttaactgcagcaggatggtgtggtgctgggctcctgaatctgtttctgcctaaagtcatatctgtaaagatcaaggaggaggagccagagcagcaggtgaggttcaagtgattaataacactggaaaggagaacaggttgcagaaactatggctcaggctacctattcagccattttcattttttgtaatgcaagtgcctattacataatcaagggtatccttagtaacatatgaagcctacattctatttccatttttaaaaagttcaccagtaaacaattgtacagcaaattttatcaatgtaaaaagccattgtactctatccagtcaaaccatattcacctctcctaaagtgcccattacggaggctctgggaaattgaagttgcccttaatcttgagttacaatgggcagggcctctttttttctctaaattttactcaataaatgcaggcttcctatgcattaaatggtgcccacaaacattgaaactactagctcacctcctgaaattcagcactttactatgtgtctttcaatgtaagagcattcactaatttaacaagcattacataacatgtgtcattaatgagttcagttagctaggccatggaatagatattcctgtaaatcaactcctttacagttactaactgacttagtttcatggcagaggcatttatttcaattagactgtggttcctgttgagataaaatgagatcaactatgtgacatgattttgaaaaccatattatattggtgcatgaatgtatatgtgtgtgggtgtaggtagtttacagacagaatgtgtaacataggcatgtggcttgtaactgaaacttttacaaaacctagttcattctcattctataaaagtgtgtacacacatgtgcatatacacacacacactgtgataatgtatctgtgtatttgagggttataaatatttagttgtagagttctgacaaagtagtaaaatagtctcacttcatctggataaagatcaccatctggaactataaaaattgcaatgattccaaattgttgaatagttggattgcatatttacttttcagtagtatgttggcatgcatgtagatccagccttcctttcaacaaagaacagtggtggaagattcccttaaatggttactctttcctcaataagagcaaccatataaaaattatagaactattagtcatcatagttgaaagtatcgcataagattaacagagtccccatctggtgatatgtttttacatcagatttattaagatcagagcgggttttaactagagcaatgacactgctattattaaataagagacggaaggcctaatacataattgtctatttctttctagacatttatgtgtttttattaggataatgaatacagaattatcaacatcatgatcatagtttttttggtttttaagtagtatctgtaatggcaagctcatttttattttataacctacccacacacagacctacagtgaagcaaaacagatgctgaaatatgtttgttgccattggctttgaagaaacctcagagaggtttgcctcagtattttaaaagcaaaatggttggtacctttctgaatagatgtcattgtgtccttcaaacaaagctgacactgtagaaaagaaatggattgccttgtctttttaccagtgaacatcttcacctgaacaaaactcatcaggaaaaataaaggattttcgaagtgtagttgttgtttaagcagatactagttattccatccttacaaatattttatatataatatatacatttatatataatatttatatgtatatttcatcacacaccaacatccacagacacacacacacacttgtttgactacttcctctattccttgaaacgcttttgagagacctgaaatatccttgtatggcaagaggggaatggaatcaagctgatttttccatttttacaatgtgcctgggattgtgctttgcagtttagtggcattttctgattcaacctcacagagccctgcatggtataatattgtctacatttaagatgagaaaagcaagatgtggagaggctaggaaatcttcccaaaggcacgaagctcctggcagaaccaggatttgaggccaagtatcaaggttacagtacagatagacatacatacactcaattataagtaaagtttttatgaggctgggtttgacagcaacatgataagtagaagtttttgatttggtaagatttttcgaaaactcagagagtttattgccaaatttatttttctcctagaaacatttttgttgttgttgttgctggcatggacagttataaaaataaattagaagtaaacagataacagtttcctggctgccttcatgtctgtgagcctaacacggctcccagaaggaaaaaatatgcctcaaggaggcttatatgatattgcttatttagggaacctttgaccacttatttacaatatccagttacagctgtgctactttcctttttgggcaaaagcacatattcgcttgaccattattttggaggaagctgatattgcctgtcacttccaacatgtccttgtgtaccctagctcataattgcagcatttaagcttggagctcccctaacaacacaattattgccaaatttaccatcgttgggaacattggtgaggcctgcttcagaggcctctttgtcagcaagaagcatgttgcagatatgcttcaccttgcatcataaatgcatttctaaaagtagtttcctattgaattattttgtaataacatgtttttctaactacaaaataaacacatgttcattgtggacaaattgggaacttcagaaaattcccaataaatattccaatatttattaatattttataaaatacacataacctgtcattgcagcttccagggatagccatcattaaaacgtgttggtttatttcctgaataaacctttaaagcatatacacacataccccacaaacatgctcacacacacacatatatatatatatatacatttttatggtcatatatatcctattatgtgccagatgaaatcaggtcggtctctctatacacacacacacacacacacacacacacacacacacacacacagacacacacacatacatacatatatctatacatatatatgtatatatgtaaatgtacatacatgtatgtgtatatatgtgtatatatgtatatatatatgtgtatacatatgtgtgtacacgtatacatatatgtgtgtatatagagagagagacctacctgatattcatctggcacataataggatatatatgaccattaaaatgtatgtatatgtatatatatatatgtgtgtgtatacatatattatttctaaattttgaaaatttttatttattattttttgagatgaagtcgccctatcgcccaggctggagtgcagtggcacaatcttggctcactgaaacctacgtctcctgggttcaagtgattcttgtacctcagcctcctgagtagctgggattttagttttgccccaccacacccaactaatttttgaatttttagtggagacagggtgtcaccatgttgcccagggtggtcttgaactcctgaagtgctgggattacaagcatgagccaacatgcccagcctgtatatatatataattttttattctgcattcttcgcttgacatttttaagaagtattttctcgtgtcatttaggattctagaaaaatctgatattctaatggtgacataggaatccattttacatgtaataaaatgatttattcaatatttagccattctttcattgttgggcattttaaattttcctcttttttctttattgtagtggttcactaagcatctttgtagaagaaatgttaatctgtatctctggttaattactttggcaaaatttttggaaatgctattactgggtcaaagagtttaaatggtgtctaaacttgtcaagacatactaaatatacttccagatagtttttacaacaaattttaagcctacatataaaaaaacagttccggtggctcacgcctgtaattccagcactttgggaggctgaggcaggcagatcacctgaggtcaggagttcgagaccagcctggccaatatggagaaaccccatctctactaaaaatacaaaaatcagctgggcatggcggtgggcacctgtaatcccagctactcaggagactgaggcaggagaatcacttgaacctgggaagcagaggttgcagtgagccaagatcactccactgcactccagcctgggcaacaagagagaaactccgtctcaaaaaaaaaaaaaaaaaaaaaaaaaaaaggttattttaagaaattgtatagtgaattctcttttttaaaaaagggaaaacatttatatatttattaatatttaaacctgcagttttataaaattttgtctagtccgacactcttgttttacaaatgggaaattgaggccccagttccatatgagagacaaatacaaaaatctgccttctaaagctggtcaaaagcagttatatctctatgatcaattcagaagttgagtcctctgttgaaatgatttcaatagttgaggtgattttactgtttctctttaatgttgtgatatattttctctcttatacgactctatagtaaaaacgagaatcattttactcaatctggttcatgtagcagtatcaggctgtgaaattcatactgctcagacactggttctccaactgtgatgtacgtaagaaatactgtgcctgctgtctcttaaatgtagagtcctgatcttcatccctaagaccctgattcatttgctttagataacactgagagctaatcatttttagcaagcatcccaggtaattctaaggccatattgtgagaaaagccagtataacgatggagaattcttatgttgatgctctgacactggctctacatctgtccataatttatttaactcctctctgcctcagtttccttatctataaaggaggaaaggaaatgccagtctcttccacctgggattcttgtgagattaaatgaaataagccatgcaaatgatttaacacagtctacagcacacagtaaatactcaataaatgtgaactcattatcgttactgttgtcattggtattcatattgatatcattattcctgcattggaaaatgtaaatgtacaattttaagtgattagcattgctggtggattattgattgcaatttgtcctgctgtctcttctgacattgctaaatttcatttacttaaatatttcccttatttttctcttgttcccacccatgcaccccagtggagttgaaattgagttgagatcaaatgcagcaggtgttgctcagagaatttggtaagactagttgaaaaaagatcagtgaaactttatcaaaaatagaatagtgattctcctggtcacctgcttagagaacccattaagaagtgtgaggttctccaggccaccatagagctataatctgcaccttgtatcagccatagcaggtatttgcacagtaaatttcccctcacctagtttattcataggtctgatcatagcacactacagactcaaactcctgggctcaagtgatcctccaatgtcagcttcttgagtagctgggactacatgtgtgggccaccatgcctgaccatggagttcttaaaaatggatattgacatacatatatagaaaattcattcaataaatagttatcactttcctatacctggtgtgagaattatgctagatattggaaatacagaaatgaatatattaatattaaagtcacttaactaagcttttccctgtgataatctttctgaaacaaagcaaaatgatacagaattctttaagtactattcaatttgtggctatttcctcctaaagatcagtgtatctgaacttgctggctgctagatattttagtcatttcaaaatgtactgatttggctaaagaatctactttgaccaaaataggataccttaaaatacaacatcagcaaaatatgtgtaaaatccccagagaaaagccctcttaaatgcctacttatttcaagtcaaatttagttaaactacataacttagtcccctgagtgtcagtggaatttctcccagagctgtgacttcgtcaagtaaagttaccctctctcttgacctttggaaagagatggcatttgttgatagttttgtgtgtgtccttaagctgggcgcttaacaaatattctctctaacaaatattctctcattaaaacctgaaacagccttttcttacacctagaactttgtaaagaatatgtcaggaataggacaatcaccttttaaggctcagacagccaagaagctgttttctttttcagtcaagtgtagagagcatccatgactgccaagttctcagccatggctggtacaggcgggtgcagtaggaggcacagttgccactcctcagaaagaacagggacatggctggacccattgtcctacttgctcagggccaggcagggtagcagacctagttgttgaatgcccttttattgatagttatttaacttcaataggatcttgtttttatggtaggcagatggtccttaattggtttgaactttgtcctcttttcatagcagaaattcttaatctgctgcccacaaataagctttggagatctgtaactcccttaaaataacaaaaatgtacaaagcatttagtaagtgtcatacagtgtgctgagcacttcacatgctttatctcctttaaatctcataaagactcatcacataggtactgttttcattcccatttttaaaatgaaatttaaagagactaaatgacttgaagaaggtcacaaaactaaatagcagtagggtcattattttaggccaggttatctaactccaaagcccttagcttaatcactaggctatactgaactttatggaattacatccaaaaggggtgtgtgtgtgtgtgtgtgtgtgtgtttgtgaatttttccgaagactcacatttccaaagatttataagtcatgtcgttctcaaaggggtctctggtctccaaaatttgaaactctttgcaacagggtggctatgttttagaatgacataaacagatacaatgttctccagagtccagagcagggtctaaacctattgggatactatacttgtgttatcaactgaaccacttggttagttcactaggaagatctgcaggtcttgagctgagcttagtgttttacagacatgtgccattcattcatcacctacaccactcatcaaatatctgaagaactatgaaggctgaaggaaaataagtgggtgagcacaggtgcaaagaaataataaatttggagcattctatttcgtgttatttcttgctaaaactggcatattaccccaaacatcaattgcaatatgctattcaacaagagtttttaactagtttataataggaaaattgctcttttttaaaaaccagggttaaagtcacatcctttctctcctctgacaaagtcactgtcacataaaataatggtcctagagtcaaaataataacagaactttgttctgatggagactgtaaatataccaatactcccattaaaaatataggtgggctgcctgaactgagaaggttgtgtcatggctgttagttttaataactggaaggcttgacagagataattgcgttagtgcttcactggcctcaagatgcatgcaatgagtaaaattaagaccatcttattaaaataccaaagcattgtataggaaactcccatgtattcaaaggggaaagaagaaaaaggaatttcatatttacggagcatgtactattttcaaaactctgttctaggtgctttcacattcattaactcattttaatatgtgagtgctttgtaatcctttttgagtgttgcaggctcagagagggtaagaagctttgcttaaggtcccctagctggcaagtaacagaacctattcaaattcagatctgatttcaaagtgcatgtagtttttgccacagtacgatgcttggggagctaaatggcatttgggaacctagagttaaagcatcagtattttttactaaggggccattggatcctagagaggcaacgaattataatggataaaaatacaaatttcaggcaagttacttctcttagcaccattgctttatccggcatagtaataaaaatcaaatgagacaatggatatgaaatgctaaaaatagtacattctctgttgttattatctattgtgattattgtgttacccttggaaaaaggcctgtagaatagtggcagctgggtcccctggacagtgaactaccaacctaaaaactgtctgggcaggcttgcctttgggagttcttgtatatcagctctaattctgtccaggaattcagaggcagagagcagggttgaggagaatttcacaggtggtaagatctccggtgaggaggcatttcagcaacgtgatcagtgttgccaaagctatgaaagatgttgaagaacacactttctacctgagatatcaactaaagtttgaagcttcaggagaaggcatagttctatcaacagacagcagtacagcaccaatagttaaaccctatatggtagatttaaatgctgagccttcaaaatcatttgcctgttttactttagctccagcaaagggatagagaaacccttcttctgtcatccctctcccatgtttgctgttgcttaagcagtatttattttggtaacaagaatacctggccttgccacttaatctccaccattccaaagaaaacctttctgagatcatcttaacgttgtctctaggcaataaatatctctggtttctagttattcccaaggacactgacctcacatttcttactgtcttaaagtcaaaagtacctttgtccttaactcacaccaatatgtatgagactaggatatgagagagattgttacatcttgcttgatgttttgacattataggtagtgtaggttttgttattacagtttgacttttgaaatgcgtatgagatttctcaggtgaaatagagcctttgatgtggtactcaaaagggataactatgactcagaggaaccatttctaaaagatggcactctttctccttccagttctttctgttcaatagtagggctggggaaaggcagaggcagtttttgttatttcaaatgacagcatcaaagatagtaatccacggtgctcaacaaaagtcgaatgaccttttttccttctccattcataaatacataagagctgatgcttcattatgtttaaatacaaaatgcacactcctactttgttttcctatatgtgagttctcatgtattcttcaaatgctcatctaattactgttacctactattccaaatgcaaatgacaaggtcccagtttactgttgatcctatattacaagagtcatcaattttggttgagaaacacaaaggacaaatatttcattattgtgctaaccatgcctattattagttttgtgcccccataacataagtaatagccccaaatacatggcacttatcacacaccaggcataattctaaatggcatgttctccatgttatggaagaagagactgaggcatggagagagtgagtaacttggccaaactcacaaggctacaaaggcagagaatcaggttttgaactcagggctgcctagaccctgtgttcttaactatcatcatatagtgtctctcttactgtttctcactgaagatgagagaggattaaaatctcaggaataaatgtaacctccacaggtaggcttatgcataaaattcagatgcaatgaataacaaaatgactgcctcccacaaaattaagaagcaaacatataatgaggacttactctgtgcacacactggtgaggacacgttacacatttcatatcaccgagttcacacacacacacacacacacacacacacacccctatatgagggcagtatgatttccccatgtgataaagaaggaaagggaagctcagacagattagatatattgtctgacattgttcagatagcaagaagcagattcaagatgcaagcatagaccagagaccattatttgagaccatgaggccttttctcaccagttattcattcacttaatattaatcacttaatatgcatttgctgagcacctgtcgatgtcttgtaaatcagtgcaggaaaatcataagatttgaaatcacagcatctaggttcatatctcagcttcatcattaaccagcaaaccagtaaacctccctgtttgcagtttcattatcaataaaatgggttgacaaaaaatttatttaacagaaatgttatgaaatgcaaataaaataatggatgtaaagaaattggcaaatggtcaagcaaaacatgaatgttaattttatgatgattaaagtaaatggtatggagacccccaacctcaaatagctgggaaggggtagttgataaggggagaaatgtgtttaaagccagttgctttattattttaaccctgagataatgctttattgacagtgtgaataagatgtttggaattgtggaaggaagaactggaggtcatattacacatttcttactacatgttgagctttgaaaagtgagaatgatttcatgaggcagaaattggttgggtctaaaacttcattatctgtaacacatactccagagagtgagaacagtatgaccagaagtatctttggaggggctagagacaagatttgaagggaattaggacaagattttaaagtaacctaagtgccgtgataaagaatccacttttataggcaaaagtagttattcaaggaagtaaaataattacattttctagccactgcaagctatctctttttccttccttttcttccttcattccttcttcctttcttcctgcctttctttccttccttccttctctccctctctccttttttcccttctttctccatcccgtttaaccacacacaaaatcccaacagcagcgtagaaagtggtgttgaagagctgggcatgtgggcagggacaccaccaaggaaggtggtgtaatatagcctggtgacgacagctttggctcttctcaccactcccgctcccgagtaagcacagcatagaggaatatgagctgagttcagtgctgtccagttggaattgggaatgttaaagctagaaggtcagcaagtccggtgttctcaacctgacaacacatcaaatagctatgacagccttttgaaaatagagattcctggatccagcttcagctttaccgactcagagtatccaaaaggaggcctaagaatctgtatttttaaaagcctctccaaagtgatatgtagcagtaattgaaaaggacaatctctttacttcattgatgaaatagctaagtcccagagaagtcaagaggcttgccaaaatcacaacgaggtagtagcggggtcagaactcaaactcaaggctcccaattctcaacccagtagtattgcccagcatcagttcttatctttgcgttataaatacattcctgcccatcaacagtggattgcaaaagcagggaggaagagagggtggcaagggtcaaaaaatagctatcaggtcctatgttctctacttgggtgacaagataattagaagcccaaacctcagcttcctgcaatatagccatgtaacaaaactgtgcatggacccctggatctaaaatttaaaaatcaataaataatacaaaagaaatacattcatatttttctgaaatattcttcagaatatcaagtgggaatccctttgttttgcaaagctggtctgatatgtttaagtaaatttaaccagatagttgttttctgtatctccctctaagtattaacaaacatttaccatacactataaagcattacaatattgttaggatgattaacaagagtaccaaaatgaaggactcttgctaaaatccttttccagctttttcattctactatttacagacatgtaagcacatccattcatttcagcaaaatgtaacattccacacaaaggttttgaacattgtgctcggctagagaatatttctagtgagtgctcataagagacattaaaataagcatttgtctttcattcaagctttatgaaggattaaaagtaatccaattgttcaatccttcatttaaatctttagtccaaagaacagaagatttgggattgagtcgtaatccagccatttaaatctatgagactctaggcacatcattgccctccttcctgagcctcagatttttcttcagcaaataaggataaaaatctacactcccaatcccatcacttattgcccagggtcactgtgtgaattccactgaacaatgcctgtgaaggtgctcagaaacaacctgcttgtgagggcataagaagcacaggaggaaaaggcctttgggaataattcttttgtctcacccaggacaggttatctgaccatcaggggcacagatggaactctttttggacatggcaagtgggtaaagcacccaaggtgccctgagagatttttttcatgtggtctgaagggccacatactttcgtgggattagtggcatatgtggtatggaaactcataattacattgcaaatttaaaggacagctctgtaggaagaagccaagagcagaataagcatagatgtggtttggattttatttttcctcttgtcaaatttaacttaagttctgaattctataaaaaaagaaaaagagtggtgaaacagtcatattttaagatttttaaaagtcttaaagacatggaaaaagcaaagacgatacctacactgcttatttaaaaaaaaactcgatttgagtttcatgaagtactggcatttgctcactctgtaattctcaaagactattttcaaaatttggtcaaattaaatttcaaaggtcagcaaagtatataatcatgtttgggttcttttttcccccaagtttaaaaaactgacatctatcctttttttaggctatctgaatgtatgaaaaaagagtagaagttattttacagcatatatttttctgtaaaagtaactacatttaacattaaattatttaccagtggtattcattttatataagcaggctggagatggaggttctatttacatatttccactgtcatggtacagtatagtactaagtattttacaggccagcaatcaaaagaattacaattgctactaggaaacactaaatctgaggattctgtcatgactatgtatagctggttagaaaaatctttgctgaattgaatggctttctcattacagatggccttgtttacactgtacttagagttctgtgtgccattttggactcctcattaaaaaagcataagtcattttttaaaagaggataagtgggaaataaaatgggagccaagattatatcgaataaattctacaaaaaaagaaaaaagaaagacaaaatacacataattgaatatcataatctatctagaaaatagatgaagtggcacaaaaatggatgaatatattcaaatgtttgagaaatattacttcataaaaatgagagaaattttaatggctggagaagtaaaacttgattttttatttgagaacatagttaatgtcaaaacaaagaaagtcagcaatgaacattgcttctcaacttgaggtgattagagaagaggtcaaatgcctttagaaaacagctgtgcatttatcttggctgtggacctggcaagtcaacaggatttatgaatagcctcaccatgaatttggtcatcctgaggggaaggaaaaccccaaattaattttggagcagaagatcagtgtaactactaccatccttacgtcttctcaatgagcttcattattcctcccagagtggctagagtaggtagttgatgagcatttgtggaatggataggtatctcttttctatgacctactctatcaccctcaggatctattaatcctttgagtttgatctctaaggtggcaatgaaatatttcttacaccagaaatacactgaaactcagagaaagagggctcaaatttgaggagagtgctatactggcaagaggatgccccaggtaatatcctttccttcttctagagaggaacatttggctctagaaaggcatttagcctatgagttcagaacaggaatggtcttaggcatctgattcaacctacgacattgccagtctgaaccaactcatcctgatcccactgcaaatgagctaggcaacagtgaagagtggttctagtctgggtttggataaattgtgaaatatttctagaatttttctatagactctgaaccatttccccagaagtgtgcacattcaaaatgtcattttgcttcagaataacattttgaataaggcaagcctaatttttgttttttaacagaattttaaaataattaattcacaatatttgtacataggataatgggatattttgttacataaataggatgtataatgaccgagacaaattatttagggtatccagcaccttgggcatttatcatttctatgtagtggaataatttcaatttctttcttctggctattttgaaatatatgatacattattcttaactataatctccctattctgctatcacacattgtaacttatttcttctatccagctgtatgtttgcatacgttagccaacctctcttcattcccctcctcctggtagctatcattctattaccttcatgatatcaactttttttagcacccacttatgagtgagaacatgccatatttgtgtttctatgcctggcttatttcacttaacattcaggtcaattcatgttgctgcaaatggcaggattttgctctttttatgactgcatagtattccattgtatgtgtatgtgtgtgtgtatatatatatatatatgtattttctctatcggtttgtttgttggtggatactttggttgattccatatcttagctattgtagatagtactgcaataaacataggggttcaggtatccctttgatatacagatttcctttcctttcctttagataaacacccagtagggggattgctggattgtataatagttctacttttagttttctgggaaatctctatgctgttttccataatggccatattaatttatattcccaccaactaagaattcccttttctccacttcctcaccagcatctatttttttttttttttggtcttttaataatagccattctaaggtaagatacctcactgtggttttgatttatagttccctgatgattagtaatgttgagtactttttacatacctgttggtcattttacatcttcttttgagaaatgtcttcatgtcctttgtccactttttgatgggattatttgggtttggtttggttttgtttttgctgttaacttgagttcttggcatattctggatattagtccgttgtcagatatatattttgcaaatattttctcccatttaacatgttgtcttttcactctgttgattattttctttgctatgtagagatttttggttttaatatagtcccatttgcctgtttttgtttttgttgcaatgctttgacgtcttaagggaagcctatttcgatctggtacttctgaaatctcattggctcaagtgaagcacgggtgtaaatcctgagtgtttgttaatctcggttctgtgtgtcttctgtaatccagagacaaattcatgtgtcaggttcacacttgagctgatcctctgtaactttgctgattgttgttaagacagaacagaaccagactggctttcactttacacaacaatcacaactgtgtgtaatgattatagacttattctctaacatctcttaagcacttaggtaatgagaaatgtcataatgaaaatatctgttaaccgaggaagatcaagggaacaaaacaaaaaacctaaatgaagtgtgaaggtggtagaagtaaagacatagatggtttcacttgggccagagatagattgaatgtgagacatttgaaagtctaatgtactttcagtacgtactttccagtttactttgatggaacgcactgtgttgaatgttattgtgctgacaaataagcccccaaattaaatgacttaaaaaataaactcattcttcatcaagtagcgttctaggatggtgtttaggaggatgtggcagctctccttgctctcagtcacggaccaggattctcccaccttctgtttctaccatccttcacgcatcagcatctttagcatccagctggcagaaaaagaacatcaagataggcatgtgggaggagctatgagccagtcctgaaagtggcatgcaatatttctgctcacatctagtcacttggccaaatctaattgcaagggaacgagaacttcttttatgcccaggaacaggcagagaatggaatatggcagacaacaagcagaatttcctatactcacagtcctgattattgacttctatgctttcccaaggtcattttgtcttcagccagattccatttcaaggaaacatgaaaatgtttcttcactctataaaatcattgttgaagtagatcctgctacctctgtggtagcccatccaacatcttaaaacttttaaaagataatttgtaaccatacataattcacccaatataagaaatcatgagagaaagctaatctcagtgtacttattatacaatgagacacataatgagacatatctttttttattctccactatatattttaaaagaattgaagaggcaagtgattgtttatggccatcgtaagataatattcttatcattgctttgcccagtaagattgaaaaaattgtctgtaattcaggccacacaaccctctgaagcccttcgccattcattcaagccccattaaggcagaaaacccatctgtttggattgttgaggttggaaactgaataatatcacttctccaaaatagatttaatagtagggctggtgaatggtttcctgacctgtttgatgcagagtgcaaacccagaggaaaaacatggtatatgagttttcgtatccattagtctaaaagaatcagaattcggttatattttaaaggcaattatagtagaactattacttttttgttttctgttataatcttacctagacttatttaacatacttaacacataatattttaaggctaagtatttctacaaaggatttatcattcaatcattcttatttagtcaataaaatcttttggagattaatttttagtaagcctaaatacccaaatagccaggaatgtgattgaggatcacatttttaaaacccatccctcaaaaagaaaattgtaatatcttgagagacaggtatggtttgaagatcacccctcttcaaagtgagttcaatatctgacctaatggaatcactccccattccccaggactaggtgacactcactgatctgggaaaaataaacacgtgcaactaacaagagaaattttgagaattatgagtaagctttgaaaatttgggtactgaaaatagagagggagggagagagggaggtgatagggagggagggaaagaataaaaaggaatgaagaaaaaactaataacaatttatctcttaagaaaatagaaggtgcagctgggtacggtggctcacgcctataatcccagcactttgggaggccgaggcaggcggatcgcctgaggtcgggagttcgagaccagcctgaccaacatggagaaaccccaaatacaaaattagccaggcatggtggcgcctgcctgtaatcccagctactcgggggcctgaggcaggagaatcacttgaacgcgggaggcggaggttgcagtgagccgagatcgcaccattgcactccagcctgcacaacaagagcaaaactccatctcagaaaacacataattaattaagtaatgatataaggtgctaaatttttattttcacccatccagtttcttttcttattctttcctgatatgtaattacctcagatgcagatctgaggtgaaactaatgaagatcaagctaagagcttctcactggcctggttccctttcaagttgtaagaagtggtactagcagctgcacgtagttttaggttttgtaaaattcaaaaaactaagatttttttgtattatttttctgaaagcagacccttataattgtataatcttcgtgtaccacaaaaccttgatcccacccctgattgcatggctgactgctgttcaaacagaaggatattcaaaataacccccgttaaaatgccttcttagagatgttccagattatttcttcaaatgtgctaatcaatctcattaacctatttctttaaataagtgaccaactcctagctaaattaaaaaatagttatgaagtttatttaaagtagaactacacagataaccatggtaaatgataaccggtatagaaaaagtaccgctgcgtctaaagatacccatgtattcacgatacaaatatttattgagcaactcgtacgtgtgaggcactgttgtacctgctgggggacacattaacgaacaaagtagatttttaaaaaaaaatctctgcacttgtggagcttatattctaatggggtgagtaagatgataaaataagtaaaaaacaaagttcatcagaagctgttaaatgcgatggagaaaaattaagagtaaggaaggttttttgtttgtttgttcaaaaaaaaaaaaggttaggaggttaggggtgccagttttaaataggccagtatgggaatatctcatgaaggtaacattgagctgatatctctagaaagaatatgccaggcaaagagaactgcaaatccaaaggccctggggagggagtatgcacagtgcttcaaggacagctagggaccaagaggctgagcagagtgaacaagagggagagatgtaggtaaagatgagattagagaggcaccagggaccaggtcactgagggccttaaaccattgggagaacgtagtattttctctgaataaaataggacaccattatgggataatgagtaggaacttgccgagaatgggcttacattttaggaggatcgctctgtctgcaatataaagaataaatgtgggtgggtggctggagaagtagcagggcacatcattaaaatatcaatgtttcaaagtcggcttattaaatcaattttacttgctctatgtcatagaaacaataaataaagacagaaacaccccgcaacactaccttgggtatttttctttgcttgcttgttttttttttttgttgttgttgttaatattttaacttttattttaggtttagggttacatgtgcaggtttgttatataggtaaacttgtgaccccgggggtttggtatacatattattttgtcacccaggtgctaagcatagtacctgacagttagtattttttttctgatcctcttctctcctcccaccctccatcctcaagttggccccagtgtctattgttcctctctttctgtctgtgtgttctcattatttggttaccacttataagtgaaaacatgcagtatttggttttcttttcctgcattagtttgctaaaaataatagcctgtagctccatccatgttcctacaaagaacatgatctcattcctttttatggctgcatagttttccatggtatatatgtaccagatttttctttatccaatctatcattcatggacatttagtttgattccatgtctttgtgattgtgaatagggctgtaattaacacatgcatgcacgtatctttatggtagaatgatttatattccttttggtatataccctgtagtttgattgctgagttgaatggtagttctgtttttagttctttcaggaatcaccacactgctttccacaatggttgaactattaataatttacattctaaccagtagtatataagcgtttccttttctctgcaaccttgccagcatctgttattttttgactttttagtaatagccattctgactggtatgaaatggtatctcactgtggttttgatttgtatttctttaatgattagtgatattgagcattttttcatacacttattggccatatgtatgccttcttttgaaaaatgttcatgtcctttgcccactttttaatggggcggtttggtttttgcttgaatgttcgtttaatttcgttgtagattctgggtattagacttttgtcaggtaatacaatttacaaacattttctcccattctgtaggttatctgtttactctctgttaatagttgtgtttttttttcctgtgcagaagctctttagtttaattaagttccatttgtcaatttttgcttttgttgcaattgcttttggcatttttatcatgaaatctttgccagttcctatgttcaaagtggtatttatttggttatcttccagggtttttatacctttagcttttacatttaggtctttaatccatcttgagccccactttgttaacaagacgctattcctctttggactttagcttgatgaagccacattttgagaaagagtgcattttggaaatatagcatcttagaagtgatcttagaaagtgaaagattggtagtaacctgctgtgagcagtacaaggaaaataaaactgagttattcctgtgggactacagctgactctcaggtccagcctggcctggagagcatgtgcttttctgctcttccctccatactcttagttagtggtcagcacatgataataggatgtaagggaagaaataaatctctacttgttttattctcaatcacagtgacacctgcatgaaattgccagagaaattaaggcctcccaatgactaccaaaaaaaaagacactttccgcttcccattgtcagcacgtattctgattgaatgtatatgtttactacttgaagttctcatgatttctaggtaattactgcaaatatggacctcatactgctactgcaggctttgcctcaagagtccaaataccatggcctcatgttagggccatttgagatcctttttgaaaaagttgctttattgtgctaaaaacaaagacacataatatgagatctaccctcttacattttaagtgtatagtacattattattagctgttagcacaatgttgtacagcatatctctagaatttattcatcttgcatgattaaatgatacacattgaacaacaactctccatttctccctccacccaggcccagcaaccaccatgctacttcctgcttctatgagttcaactactttaaatccctcatataagagggatcatgcaatatttatctttctgtgactgacttatttcacttggcataatgtcctcaaaattcatccatgttgtagcatatgacaggatatccttcttttaaggctaaataatattccattgtatgtatataccacattttttaatccattcgttcattgatggatatttagattgtttccacatcttggtattgtgaatatacataaatgaatatgggaatataaatatctctttgacatgctgatctcaattttttggataaatacccagaagttgaattggtagatcatatggtagttctgtttttaattttttgaggaacttccatactgttttttatagtagtggcatcactttacagtcccaccatcagtacataaggattccaatttctgtatgtccttgccaacaggtttttttttttaataatggccatcctaacaggagtgaagcaatatctcattgtggttttcctttgcatttccttaatgattagtgaggttgagcatcttttcatatccctgtttgccattttttgtcttctttggagaaacgtccatttctttcattgggtttttttaattttgaggggtttcaattgggttttgggggggttttgctattgagttgtaggagctcctatgtattgtagatattaataccatatcagatatatggtttgcaaatgttttctcctaatctgtaggttgtattttcactgtgttttctcccttgctgtgcagaaacattttattttgatgtagtcccacttgcctatttttgctttttttgcttatgctttgatgctgctgtggattaggaaacttaatattgttaaaatgtccacaatgtccaatgtaatctccatcaaaatcccaatggtattttttatagaaatagaaaagcagtcttcataagaaaccacaaaaggctgaatagtcaaaacaatcttgaaaaagaacaaaatatctggagatctcacacttcctgatttcaaaacatattactaagtgacagtaatcaaaacaatgtggtactggcataaagacagacataaaaccaatagaacagaatagagccaagaaataaactcacacatacacagtcaactgatctttgacaaggatgtccagaatatacaatgaagaaaagtcttgaatggtattggaaaatggtattggggaaactagatattcacatgcaaaagaatgaaactaaacctttatcttaaatcatacacaaaaaatccactcaagacttaattataacacctgaagctgtaaacctagaagaaaatttagggggaaaatttcatggcattggtcttggcaataatttgagatgctttcttagagagagtttcagttaagaaaatttttcttaacagtcattaaaaagtaatgtataaacttcaagtaaaacaatttttggttggggctttctggttgccttagtcaactcaggccgcataacaaagtaccctagactggtggcctaaacagaaatgttctcacaattctggatgctgagaagtccaagaccaagattggctgatttggttcctgttgagggctctcttcctacatacagatggctgctttctcactctgtcctcacatggtgaagagagaatgctcttgtgtctctctctgttcttataagaacaccagcactattggattagggcctcatccatatggcctcgtttaacatatgaattctaggggaaacaagatagatttaacctcaacctcaacctcatgtaaccattggtgattaaggcttcaacatatgaattataggggaaacaagattcagtccataacactggcctaataaatacttttcagaaaaattggccttttatcatatcattgtgtcaaaagtgtgctaagcaagtccagcttatcctctttcatttatagtccagacatcaaactcatgctatcatttccatcttgaatctctttattgccctgtgttacttgggagtgtcactgacaagccagaaacatatgttgtatatttccagtaccacctaatgttttactcataagtaagcatatacccttcatctttgtaccagtgtgtgtgtgtgtgtgtgtgtgtgtgtgtgtgtgtatgtgtgtgtgtatgacaggatctcactgtgttacccagactggagcgcagtggcatgatttagactcactgaagcctcagcctcctgggctcaagtgattctcctgcctcagcaccacaggcttgtgccatcatcgtgcctgacttttttttttttttttttttttttttgtagaaacagggtttcatcatgttgcccaggctggtcttgaactcctgagctcaagcaatccactccccttagcctcccaaagttctgggattacaagtgtgagccaccatgcccagccctgggcttttgtttataaaaatcatctgtgaaaacaaagggtaaaacgtgtctgttaaatatcttaactctgtgcaaatatatatattatacaagctaacatgtgtagtataatttagctgtgtaatcttgtaaagtagctaaatatcatgccttctccgggtatcctacttaaatttaatatgcagttttatgattgattgggaaagattgccatctgtgcatatcactgtaaaatgctagtttctacagtctcatctccatagataatcagagaaaagtaaatattaaaatggtgaattttgcaaatcattattttgtttacttcagagaagctatttgacctgcagggaaattttcaatagagaagtatcagtggcattgattagaaacgagcttcataaccttgtgatattgataacaatgggtaaaatatttagtattataaagagggaaaaatgtatgtagtcatccagttacagttactctccccttaagctcaagggtaagcctcccctccccttgagggcaaagcatcaaaatgagttccaatgtgttggctaacagcatgagctacaatacacaggggagagtggagtacaggaatataaacatcagtataattgtgacctgaggtccccaagctacaccctgtgtctggagacctgaggtctgaaggactgtttctgctcattatattcagctggagccccacctaggttgttgggacctccaagccttccacacttcctggtaggaaattattctttctcctcagtgagtaatatctagaaaaaaatcagcagtctccaccctccccagatgttatcacactggaattatggagttgggtggagacataaaagcagctgaaacttttagagcaatctggctccagcatctgtcacctcattgattgcaagggctgattcaggtgatttggccctcagttctcttcctctttcatctctccctttaggttcttcccaaagccatgtgttcaaataaagttaaagagaatgacctagatgaagatctccctgggagaaaaagagtaataaaaatgaaaaacaatagctgctaaataatgggagtgtactagctgccaggcaatgtggtgaatgctttccaaacattttctcttctaatccttataatggccctagagctaggtattgtaattatctttatcagcagtgaaagcctagaaaatacagcaacttgccctagagcacccaaataggaagtggctgaaccaagatttcaaatttaacctgtgttttctaactcttaaataaacatcttaacaggaacatttttggtaggtcaatattttctatgtgccattgttcttactatgtagtgaaaaaggcagctttcagatggtcctggcttcagtgatggctcccaggattcccagcgacattcagcaagatcttccctgtgagtggccttcatagatgcttcggtaatggaggctgctattgatagaggttccttagcagctgctccactgaggccctcattgccccacccactttgggcttcatactgggggtcagtgctaagtataaggtcctgatggctaggatagatgaggaaagctatttactcagcacagtagcaggactctggctcaggagagggcccatatcatggtcaaaaataaattgggaaaagtttaaactagggaagcagtgtctagcaaaaggccaaaaagatgagaaatgaccttcagcagacaaacaattacaaggtcagtagacacaaagtatgcgagcagttgagagcgtggatgaaaggtagattggaactgtattaccatccagtaattccactgaaatggaacagtgtggagaactgggagtaattagttcattcgtcagtttgtccgacttctctttgtttcttgtagggggctggttccatagaaaaggatgggtctgtggagtaaatggtcatgagtagtgctagccacacacattctttaacacttctgaatgcagcaggccagctggtcattactgttactgccccctcatgggagaccaaatatagctatatcattcctcctccaaaactgccttctggcaaaagttatctcttttaagaattgtgtgcattcttaaattgcattaagggaagcaaacatatggaacaagaaagcacctcacttagttccatttgctaagcccttttgcagacccactgacccttccttaattccaaatgaaatctcaaatgctataaagaaacccgccaaatgggttacagcaaagacttttttacaccctactgttatgttcagaattggaaaaagctggggatttggcaaattccaaaatgttgggtcatatgaaaacttttttttttgagacagagtctcgctctgtcgcccaagctggagtgcagtgacgtaatcatggctcacttcagcctcgacctccttagttcaggtgatcctcctgcctccacctctggggtagctgggactacagataagcaccaccacacccaggtaattttaaaattttttgtaaagatggtgtttcaccatgttgcccaggctggccctgaactcctgggctcaagcagttcaccagccttggcttcctaaagtgctgggattataggcatgagccaccacacccagccccatacgaaaatttagtctcagaattagcctttgcatgcgtcacctgtaagttaatcagaatgttactttcaaaagttccctgcaggtgaggaagctaaaaggtattcttgtatttttttaaatgaaacttcataatagaggtgtaaacagagtccattctccccagccttagaatcagacagcttgagtttaaaacccacttatgagcttgagcatactactgaacatagagtcacttgtctatgcctcagagtccccatggtcgaatggaaaatacagtgcctacttcaaagtgttattgtgaggattaaatgagataatatatgcaaagcacagcgcctggaacatggaaagtgctccagaagttttattgttattaacattattattattgccaccatcatcattaaacttggtaatttttactctccccaatcctttagttactttttcaaacttctagttttttgcttgggctccatctaattggctgtgagtcaaaagagaattcaccacatccaagtgttttctaaagaatgtctttggaaaattcacaactgatcattttgataccagcatctaaggttagggctaccttatccttcatcaccttcttgttttattcataacaccacgatgtggactattgataaaattatgtttcaaagataactagcttatttgaagccatctataatttcagcccaaactgactaattaggctaactttcagaaagttaagtaagtgtctaattctcagttaacttactacctactgagtaaaaatgtgctgccttttaaaatccacaactaacctccctactcaaggcaaaccccctagttctaatatttgaagtatttaatgaacaagcctttttgggggtcctcttgtagttaaaacatttatttttctcctttttttttttaactctgttttttgtctttctttttttttttttttttttttttttgagacagagtcatgctctgtcgcctagattggagtgcagtgacacgatcagtcactgtaaccttgaactcctggtctgaagcgatcctcccacgtgtgcctctaaagtgtcgggattacaggcatgagctactgtgctcagcctctactctgttttctaccttttatttgttgcaaaagcaacatgtttattttaacaaatactggtcttcctcatcttactcccctgagatttcaatgttaaaagttgatttgtgtgtttccacgtaagtctttataacaagcttctgctgacactccttggcccagctttccataaacacatccatccctacctattaggttgaactgtacaaaattgccatttttataggtccccactattctttaataccaagcctcaaatttagccagacactaaatgtcctgttttatatacacgccttattcattccttcttggttttgtttttgtggcttcacttttgctggatggcctccacccccaaccccagctctactctggctggacattttttaactctccttcaaaggtgtacatcctgcaacttcttaaattccctttacattcattgtctacatcacatagtctgattgcctatataatacaatttcgtgttttagtatttatatgctatttaatacagatgccacctgttttgctgcttttattttctctggttgcttgatgttctattaccttaactagactttagtgctttctagaaaaggacaatgtgtagtatatctgtacttattcaagtgctgatctaaggacataggatgtaatgtaaaagtttattcaatgactatttcaaaatacaaagtctctctttgtataaagtcattcactaatactgacattggctgatacttcagactggagattctcggtaatattactttttcttgataattaattttgattataagaggatttaatatcatggaaataaattatgcaaatgaactcagaccctaggttcacttcccagaacaaaccgtattctgagaatacttgtggtgccaaaatttagagtgaaaccccagactattaatgatgctcaagttactttactccaacacaataagtactcagtgatttgttacggaaattcaattaagtcttctcaagtattttttttcttttcttttttttttttaattatactttaagttttagggtacatgtgcacattgtgcaggttagatacatatgtatacatgtgccatgctggtgcactgcacccactaactcgtcatctagcattaggtatatctcccagtgctatccctcccccctccccccaccccacaacagtccccagagtgtgatattccccttcctgtgtccatgtgatctcattgttcaattcccacctatgagtgagaatatgcggtgtttggttttttgttcttgcgatagtttactgagaatgatgatttccaatttcatccatgtccctacaaaggacatgaactcatcatttaagaaaaagtccaataaaatatcagtcactatttttagatcttcattctcaatgtttgtaaagctaatactaatattagattaatgtaattttatcaatattgataattacttagtatacattgtgaactttgttttttggatgtcatttaaagggttattttcatgagttcctaagaaataatttaggcctttaaggttatttaacccttcagtagaaaatagtttccttgtttaagaaaatgatctccatctagtggacaaatttttatattacagtatacaaagaaaaatattaaagcccctagaatatctcatatcaagcacttcctgacctattaataaatgttttggttttagtgctaatattatggcttaaaagttgtaagatttaaaaatatcataactatctaaatgacttaaggtatttagcaatatttgtttcaaaacttatagtggagtgttaagacttgcttgatttaattggaaaaattataattaaagaaaaaattactgatttatacaaatttggtgtttactcagttgaactgaaaaaaactaaaccaaaactcacacttctgtatctcttacatttctgttcatgcacaggaaggagggggtattttcttttttaaagtgtagcaataagaatatcttgatattaaagggaaataaacataaacatttctacaggcattcacattactaggtcctcctcatgctgaaaagctgccatgactatcttcttagaagagaaatctactttgccaaacccccactatttagaagtttttaatgtcttccagttgtgtactaaataccttcaaaaaccttcttaaatactactcttcatgaaaacttctcagatatcccagcctgagttagtcattcatcctttatttttgtatcttaatgcactcatattaagtgcttaataaatgcctatttaagcatatccaaggagagtttgccaaagatccctaatgtatgtctattgaatgattagagaccatcctccccttccagccttcctgggaattgacaaggtttcacatacatatgtgcctatcctattctggtgaaacagatgtcccctgtttgggtgccacatatatttgtggtttatataatcatgcagtagagctggaaggactttaggaacaatcgatgattcaatgcagttagctcagtgactggtcaattaacttttctaggacctggtatcctcgtctgtaaagtgagtctgttcgacttgacaatctctcattgtccttcctgaaccaaataaatatatctataaagagacacaattctaagaaaattttaagttggaaaaacatatttacagctgctcaagataatgagttttccctcttctgtttatttgatggattatttcggagccactgttatttgatcacagattcaaaagtgatccatgaaacatcttccaatcttagagtcataactctatttattaatgactccgataaagaaaataaaggaatgttttaaaatgagctagttaatagtttgaataaagattctaatggggaaaatattaatgacagcaaaacttgaattcacatgtttatttattctttcaacaagtttttctttaaaaccacacacctgctgggctatcataagctatcaccctcctctcctaagaacacatgaaagttgactttattttaatactggttgatgtttcactagaaaggttctttgtggaaagtttatctagattataaggactatgacgttaagaactgtgtgtgtagattttttcccagctctaaaatatgtattgctgagcacagtgccttttattcatttaatcatttactcaagacacttgggcacagttttcaatgtgccaagaatacgctgagtctccatttgtagagagctcacaatctaggaatggagaccgggtgaaaaacattttcaattcattgtaaattctgtcattagggagtgggaaagtgtcttgggagcgtagagaaagggcctttcataaagctctgatgtaccagggtagcctttcaggtgcaggctaagtctcaaggatgagtgacagttaggcaggggaaaggggatttgattatttaggggagcaggaggtgaggtggtgatggcctgtgagaaggagatagtgcctcaatatgagttgagcaagaagtacccaatagctgaggatggcaagttgaggctgggggcaactaattgcaattgagagcagatggttagactggcagtctggcaaagaaattttgacttcatcctgagagcaatggtaagttactgaagggttttaaactgaagaatgacactggaaaatggattcaagacactaatataaaggttgttataataatataggtgaaatttgatggagacctgaatttaaaatattggtagtagggatggaaggaagtgggtacaatagaaattaatgcttggatggatgttatagggtaggagtgtggagggagaagcccaggtttgggagaacagcattaggcacaaaatgggtatttgttgaatcgaattcaaatatttgatgaattactgtgtatttgttattttccgaaaggaattttgtacttagaagattatgttttgcagagtgtttcccttttaactgaagtagagtttggaaaaacctgtatcttgtatctggtcagttaacaacagtatccaggagaacaagaatgtgaagtcaatgtgtttttcttttatgtatttcaatattatcatatttttatggcagaaattagctgtaattttcattcctgctaattccactgtcagttcctcagctgacgctaaatgctttttgaaaatatgaacatgtgaatgttcacagcaacataattccttctccttcctttacagttttgatgtggacaatggcacatctgcgggacggagtcccttggatcccatgaccagcccaggatccgggctaattctccaagcaaattttgtccacagtcaacgacgggagtccttcctgtatcgatccgacagcgattatgacctctctccaaagtctatgtcccggaactcctccattgccagtgatatgtaagtacaagggcaggcaaagagagagaaaaccgagtaaatttatatctagagctgatgacataataaaactaatgacttttgttcaactgtatcactctcctccaatgtagaaagaatatgaataaaattatacaagctagaaatgaatggtagatttaacctgagtgcactgtcactcttgattaacacacacacacacacacacacacacacacacacacgcatgtatttattttcccagaaaatactttataggaaaactgagaattaaatttttaatggaaactaacacttaaatcattagcttatatttatgtagagcctgagttttagctacctaactacatggatattttctaatattttgaaaagctttcaactccattgaaaagtcctgtgataatagactgtatagcattttgaatatatttcaattaatgtatgtacagatgttagcactggtttgccagatcatttaagaaatctttgtgggactttgccaaaattaaaccaacttttaaggatcatgagaggcaagcacagaaaacattagacagacttgaatatcatttaagatatagtacagcttgaaaaacaatgaaaactgacaagcaggtttgcagatcctgtaccatcactagctcattttctcagtgcatttcattcttgtggtagtgtgcatgtttttctacataggtctttattctcactcaatacctatactatcattcgtggcacatctgcctctgtatagaatcgatcttcatctttctctcttggtctatacatttgtccaataacattcaccatcttttcatgacacccatctcaaaaactcataacaggctgcaatttatcttataagaattagtctgtatggaacccctgagtgtctagtgttattcttgccattctaacagagcatcagttgtattgcaataggtctacatggggttctagaaatgaaattatatttcactcatttttacaaactatggttgctattttagcagttgtattattgacgtctacccttcttcatctctaaacaactttctattcctagtggccctatttttacattatttttatctcacttccttagatttgaaattcatgacacttacttattcattcacacataatgagaatgcttcttgagcaaatatggtgtatttaaagctctgaatctgtggagcagtgaggtctggcattttagaccattgtaataaaatatggtgagcacaatccttgaggcatttatcatgtactgcaggaacagagagaggagatggagagttttccacccaagggaaagatacagaaaataccgggctaagggaacaacatttactaaatgtgaggcatggaaaattatggctgaactaaggaatgacaatctgcttgatgtgaatagcgaaacctggcaagagagaagaaaatttcaaatacagtctatgggacctgagagccacagaggtttttagctgagttttggcatgatcatattcttgtttttattgcatcttgattactctattgttgaatgattgcatagcgaagtcactacagggaagtatttcatgtcgaaattcacagaagtaaggcaggctaaatatgatgaagacctaagtcaagggagtgatggcagtggagcaaagagctggtttagatgcaagaggcttatagaatggttgtgtgtgtgtgtgtgtgtgtgtgtgtgtgtgtgtgtgtgtgtggaagtatgtatgtatgttgggggacagccagtggagaaggagaatcaaagagagtgctgatttttgtccatgaatgagtacgtacatggtgatgtacgtacatggtgatgaggaacaaagggcagagagtagaaaacatgacagataacaggtgatgaattggtttgtacatgataaggctaggggaaacaagacaacagttaaagtactgggacagcaaacagaaataacagtccagaggaccaggagaaatagaacagttaccttctataattactaggtttttgaatgacagttgagtggtgcgttgtattcaggtaatagcattaggagcccctgggttaaggagtgaattgaaagtggaaatgtgagcaaatgcaggcatctctttaaaaggctgatgggtggagtaggaagaaagaactaaggctgcctgacagagaattaggttcaagcggaatttttttgaattcaggttacttgagctgagggaaggctccaggagatagaaagagactaaaaattcaaggggaaagagggtttaaagatggagctgtagttgctgacaaaaacatgatcatgagccaaagtaaggaggctatccttggaaaagtagtaaataccagaactgtattctttaggaaggacaaagaagacctgccttggcaacatagtgagaccttgtccttactaaaaatccaaaaaaatagctgggcatggtggcacatgcctttagtcccagctactctggagaggtaggaggattggttgagcctgggagttcagggttgcagtgagctacgatcatgccactgcagtccagcctgggtgacagaggaagacaagactgtgtctggaaaaaaagaaaaaaagaagaaggaggagaaggagaagaataagagagaagagaagaaggagaaggagaagaagagtaaaagaagggaaatgtaaatttagagatggaggagtaaaatgttaagagatattagccatgagttctctaaacattttactcctccatctccagatgaatgaatgtaaaagtagaaggtacagccatcaatagccagaggagagagggatggggcagcttgagaagaaagggaaaggcttaaaaaagccactatgcagatcaaaaaagggaacagggtaaaggtgagtagaatactgaccagccccatagataacaataaacaatgttaaataggcgaatgacagaattgaaagtcatctaatgcaacttcatcaaaggtgagtcaggcttggtattgacaaaagaaagaggaaaactcacagtgagttagtggagtccatttatgtagttatgtgttctacctttttaaattgtagtaaactgagtttgggatagattgtttctttcatacattctactccagttagtaaatattaaatatatacatatattttatgaaaagcttatagcatttcatatttaaatatgaaatgcttttatttcaaaatcaaacttgcaaggatacctcattttgctgtgtgcctcaagagttctttatctgatcagactcaggtaggaatgatgagtttaatcagaccatgagtcaacactatattttgctgaaaagtaatgtgttgatatgtttagctttccattctccttggatatttacattggagcagtaagatattcctttgataccaactcctagaaagcattctttctaccaaggagattaagtttctgtggaaggaaaaggaaatagaataaataataactatttcaacatttaatctgacacgacacatatcttccaccataaaggactgtgccttctcttaatttgaattctcatatggccatgtgtaaactttaattttctcaccttacctagttcacaataatgctatgaagactgtctgatgtgtataattcaactgcgctttatagagaatgatgttatatatttaattacttgatgatttcttattaatagttctagttaagctttcctattgagaaattttcttagaaatttcaaatacaaacagtacctaatgaggataggtacctaatgaagggtatttaaaatgaaggtttgtggttatctatttaattgaactgttttggaaaacctttaaatactctttaagtttaaatataactatttactctattgggaaagtgagaagaaggaagataatcccttcctagtagataggatatcgtcatcttatcctctataaatagaaaccaatgaaatagctgaagaacaaaacagataaagatggtagtaataataatcataacatacatggtgtgtgtatatcatcaactttcccaagtattttcacaccagctatcttatttgatatactcacagtccttttgatagggacattgttatgccattttacaggttagaaagccaaagtccaatgagcttaatcttttgaaaaaaaagcaagcattttgattatttctaggagcacataatttgataatgccattgtaaacaaagtactttatactactacagcaaaaactgctgagaaacagaagtaattgttgaccaaattcattaaaccaatgaaatacatagcagtatcaaaatttgattaagaataaaataaaagctcaaggaggtacaaagtaaatatgcagccaactcttagagaatgtatacaagtatatagcactaggctaaattcagaatctaaaaaattagctcatataaggcagaagagaagttcctgaccacttctgctcagagaccgtcacacaatttgttaaatatagatgatgcagtagcaacttaattcttaagaaaagtaagaaaaagaaaaatgttaagtattagcatgagtctagtaaataaatacatgaaaataaacttgcattaccattaatagtaaaaattttttataacagtagaaacaactagataacaaaaggctggttgcccaagtggtgtcatgaagtaacatgaagaaaattacagcgtaaatagacaatatttttgtcatcttaatatttcagcatctgaataacaatcacttctgtgttttcacatcatccagtaatatagtatctgtatttggaaacacataaagttatgatacattgcaaagattaagaggagaattagcaatgacaagataagtagaattaagtcacaaaactatgaatttattaagtataagttacctgtcaaactacttaagttttaagaaatactcaattcacctggataactaatcctctattccccatcctctgttaaattaacaccaacacatagaatgcaaagatgatccaatcggctcttcactcacattcatatacattgcttctacacacagaatatggggtggggtgaatgcattcagagggccagtgacgaggaagtgagtagatttgatataccataaaaagctggggcatatttgggaatctagctaagttatccccaggcactatacagatatctcagacctcactgatcaggccttcggggtgccccattggggcattttctcagctagtagataatactctccctacctcccatgtcaaactactgtcctttctttagcaattaacaagtccctcaccacttcttgggcctctaatgtgtgttttcagtcacagccactcctctctactacttttgcctgctaagtataagagtagtattgcttccagtcctgagtttgaaaaaggaagaagaattccctttatgtcaatttgtatcttttattccagattattaatcttccctggtctcactaggaagaatataaataaaaagacacgttgcattacaaaggttctaattctcactggatctacatgaaaagtttgtagtcatctcttacctagattgcaagataatattacactaatgaacatttcaaaagcatatcaatttgttatcttgaaagctttcttccattaaccacagaaagaaagctaccatggccaaatcatctcttccccagttctgggtttttcccagctggggaggtatcctcacccctcaccctgtggtgtaggagtgatgggactagggccagagttctcaaaatgtgtcctgaggcaacagagggaatgtacatgggtgcaagcgttattttaaatgttcaagaaaaacacgaaaacatctgtcaaccacctggaaaactaatagcttggaatagttcccagtttccaattaagaccatgatattcctttctgtgacaccatatctttgcaaaattgggttttcagcagttgctggataaaaatgaagtgctgagcagaaatcaatgtgcaacaaaaaataagggaggcaatgtccaatctcattccaaaatgagaaattgacatagtgctcagtgggtgctaaattgttagaacaaaaccttattaagttatttggacttaactatttaataattggaactattatttattttggccaatgtgttgctgttattaaaaaattgagatattaagggcaccatgtactgagaaagtctgaaaatatttggattagttgtttattcatatctgaagaattagagctaaatcaggctaggcatggtggctcacatctgtaatcctggcaatttgggaggccaaggcaggcagatggcttgagctgaggagtttgagaccaacttgggcaacatggtgaaaccctgtctctacaaaaaatacaaaaatttgctgggcatggtggtgggcgcctgtagtctcagctacttgggaggctgaagcaggaggatcacttgaacccaggatgttgaggttgtagtgagccacgattgagccactgcactccagcctggatgacagagtgagaccctgcctcaagacaaaaaaaaatgattaaagataaatcagatctctatgtgagactatttgagagaattttgttaggagttaaaaaaataacagtttccaagctgtgaagtatctgatgtgctctagagtagagaatttatctttttcttaattctgttaggatcccaggtagccaaaatctttttttataaaatgtgatattattttggtaatgacctagatagaccaggctttttcttccattgctgtgtgctggccactgttactagtattattcggagtgttgatgcaggcattaatactagctattaaatctcaagaagtttattggcaaaatatgctaaggtcatctgctactagaatacctttttactatctttttgtttaaaaattctgctttatttggtgccatttattcaatcacttaagtcattttatttctgatttaaaaaaatgggagtttcatgaattgtaaaataagtcttataaattagctaaacaagtttcttcaatccttgaactgggggatttaaaatattagctgaataggcattttatattcctaatctcatactttcaaaaaaatcataaaaatgaaatcctgatgtttagacattttaaatggtaatgtttttaatgccacagtataaaaataaagcattgattttaatgcactgctacagtgagatggtgccagcacctctaagtatcattgccagtgctctaacctttaaaataacgaattaattgagttatatgtagtaatatatcttggctattactgccaaagtaatagatatatactgaagtcttaggagagatagagggataaatgttagttataaaaagttgttaaagcagagggaaaaagaagtgaaaactgaccaaacatatacgtaattcattgtttctatgacaagcctgctgcaattcgaactctaggactttgtgctaatatttagcataccattttattttctagatttcctttatactcactatgttcctcagtatttgcactcacttcttttgtttgtttgttttgagatagagtctcactctgttgcgcaggttggagtgcagtggcacaatctcagctcactgcatcctccgcctcccaggttcaagcgattctcctgcctcagcctcctgagtagctgggattacaggtacctgccaccgtgcctggctgattgtgtttttttttttacttttagtagagatggggtttcaccatgttgaccaggctgggctcgaactcctgacctcaagtgatcctcccaccttggcctcccaaagtgctgggattacagactgaactcacttttaaatcttttaaatgtgaaaaaaaaaactctaaaaatcatgtgagtttttctcactcctgtataaaagagaaagagtgtgaaggtgaattatttaaacttataaataatgattatataattatgcttatacatcagatttaatacatttcaaaggataatatctactttctttaaaaaaaaatgcagggagaagtggtagtttaataacaagagcaattattccacaatcctatgagacactgaattcctgccagaagaaagtaaactcagaattggcctcagtcaaggaagattagcctatttttcagtgcataccaaaagaatgcaatctctaagagcacattatgtgtgaaataaactaaaataaggaaagtttgaagaacattttgaaagaaaaaaactagtccagtaacctggatagtgctctcaatgaaacacggcccctagatgaaggacccatagttgaaaattactgattcttcctgcctcttgaaattccaagaggcaaatggccattacaggagagatattggttcacccagttgtggatattgtacctagaggtacactagtgtactctcactttatctcaaccctcttccctctgtatattaaagaagactaaaatcaaaaccatgctccagtgtattgtaaaatagaaatattttgaactttaatttttttttcttttcttttgagacagagtctcactctattattgcccaggctggagtgcagcagtgtaatcacagctcactgcagccttgagctcttgggctcaagtgattctcccacctcagtctccctagtagcccaaacacaggggtatgctaccacacccggctaattttttttaatttttagcagaaatgaggtcttgctatgttgcccaggttggtctcgaattcctgagctcaagcaatactcctgctttggcttcccaaagtgctgaaattacaggcaagagccactatgcacagcctgaactttaagtcttgacggtggggcatatggtggcaggctgggaagaagaagaaagttgacttctattggagatgaccaatacgtgttttccaccacattctaaataaaggtgtgtattaattgatgtgcatttttgaatgagtatcactgttttactcgtttggaaaataacagtagcacctactccatgccagggtatcatttgaagacaccatagatccatgaaagtaagacaaaaaaattgtttggagcatgcattcttgtctttatttaatttttaaaaattcttgatacaaaaggagatgtttccagccaacactgagattcccatatgaatacttgttttcacttacacatcaatcattttaaatatttacttttgcttgtcagtcttagcttcttaatgaattgttctcaatgtctcctttactgttttctgagccatataaggaaaaacagtcacactgctggaacatttatgtgatgtgtttcttgagataagatattccagggagtattactaaatcatactgtctaagcccttgcaatatgaatcatctaaagatgtgcttctataaataaacagaaagaaagcatcaagcagacccatggtttttctttagaaaaccaagtaaggaatatcaaccactgggctttgctttcagattcctggtaatctgtggtatgattcacaccaggttcacagaggaaacaaccccaattattccgtctgcctactgcagcatctcctaggctttgtgtccacctacggttaattgccttgagactttatggtttttcctaaccttgggtcaagaaaaatttgctgacattgaatactggaaagttgtatctaaacatatataatgtgtcaattcctgcaaccctctctttaagacgcagggaacttcagagcagaaagaaaaagaataactgctcacccctcaacaaatgtggaaggttgtgatgtgacaagaaatcatttcaccagttcagtaaatgatgttgtctcccaataaatgtcatgaatgatcccaagtccaaaattttttaactcattgtttcactcccaagggagaacaaagctacatgcagatctcatatttccatgtttcaaaattcattttttctttggtgcttacagaacttcaaattgaatttgttataaccaccaagatcagttttgtttttgtggattggtgtgtgtgtgtgtgtgtgtgtgtgtgtgtgtgtgtgtgtgtgtgtttagctagtggatagcatattagacagcaccgagagtcttgcagaatattctgttgcagaaatagaatgttgcagaaatattctattggacagtgctgttctagagtctaaaacatttacttctatgtgccttcagaatagtctaaatccatttgagcatacagaaagcggcatggtaaaaacaaaacagtatttgaaggcctgggctcaaatccagctacactgaacatttccatgccttgggattttatgacccagtaaaatttctgggacactgacctagggttactaactccttattttgccaggtaaagaacattaacaaggaattacccatcaatatatatgttaattttattttttaaagacattttcacttcagtgaaaaagaaagagcataatctcagaataaaagaattttccaaaggaatacgtatagtttaaaaaaaaaatctcactgcatggtccatgtacactctgactttgacaaggaccactgagcattctgttgggcaagtaccagatcttagagtggcatttggaaaccactgagttctgtcagcttgtcaagggcatgactgccaatgagtaacttaagttgtcagggcctagttccttatgttagaatgggaatatgagcatccatttaatgcagagttgtcaggattaaattcagcatgttggtagaacaccgtgtctggtgcctagtaggcattcataaaacacattgctctcctctctgtttgatcaagggcttccttttaatctattgaatcttttcaccacatgcagacctttaaaattgttgcactagttgaccaaaaatcttttccctaggatcccattctggtgaaaaaccaaaagggcagggccactggcattaagaacaagcctgccaataagataaactgtgaaagaagatcccgttcctagaacacaaagtgagagcacttgtgaatccctgcccatgtactcaactctttcgctgtctttcttccctccatggaagtcagactctcagctttgtactcaaaccttctggtgataatttgggacatcagccgtcctagaaaagtctctctattgtattggtttttattaaacaaaataacctaatatgcttagtgaatatgtctacacacatgtgctaaacatttgtttaattatttaacttggaaaattttggtgtatcatttctaacagagatagtctttgtgccatcatataactaacaaatttgaaggcattcattggcatcatgtattttctctaatgagtcctaaattgttttctcatgacaaataaagagattccattttagactagattattttttgcttatgttgcgtaaacttcagtcccatctgctttatcatcagtgcctgtcctccacaagtgatatgagcacacatgagccaaaaattaaggatttttggttgaaagattttttttttttttttggtcaaagatggggccgggctctaattcttgttttaaatttatttttcatcaacaaataacaaattatatgcatttattatatacaaggtaatattttgatatatgtatacattgtggaatgattaaatcaagcaattaacaggtccatcacctaacaatttatcattttttgtgatgagtacatttaaaatctactctcagcaattttcaggtatactatgcatgattattaattatagtcaccagcctgtacagtagatctcttgaaattgtttctccttctaactgaaactttgtaccctttcaccaacatctcccattccacatcctcccattctcccccaggccctgctccagtccctgggaacaactgttctactctctgcttctataagtttgattttgtttttagattccacatatgtgtgagatcacatggtatttatctttcttgcctggcttatttcactaagcataatgtattctaggaacatccatattgtcataaatggaaggatatcccctttttaagcctgagtaggattctagtgtgtgtgtgtgtgtgtgtatataacattttctttattcatctgttgttagacacttaagttgattccatattttggctattgtgattaatgctgcaccaaacatgggagtgcaggtatctctttgacatactgatttcattttctttggatatatacccagaagtagaattgctggatcatatggtagttttatccttaattttttgaagacccttcatactgttttccatagtgactgtactagtttacattcccaccaacagtgtaaaaaggcttccttttctccatgtcttcaccaacatttgttacctttttttgattaaaaaaaaactattataggtgtcaggtgatatctcatcatggttttaatttgcatttcacttaagattagtgatgttgagcacttttacatatacctgttgacctttttttgtaggtcttgttttgattttaatttttttgtagagaaggtgtctcacgatgttgcccaagctggtttcaaactcctgggcttaagctatcctgctacctcagcctcctaaggtgctgggattacaggtgtaagccactgtgtcaggccattgttttgagaaagacctattcaggttttttgcccattttaaaatcaggttatttgtttttttgccattgagttgtttcttaattcttaaaatattaataagatgtgagcaaacagtttaaatttcagaaaactaaatatctttgaaggtcactgtactagtctgttctcatgctgctgataaagacatatctgagactgggcaatttacaaaaggaagaggtttaactggactcagagttccacgtggctggggaggcctcacaatcatggtggaaggcgaggaggagcaattcacatcttatgtggatggcaacaggcaaagagagagagcttgagcaggggacctcctctttttaaaaaattagatctcataagactcattcactactatgagaacaacgcaggaaagaccagaccccctaattcagtcatctcccaccaggctcctctcaggacatgtggaagttgtcggagttaaaattcaagatgagaaccccatctcaaaaaaaaaaaattctaacctgctttaagaaataaaaatagtggtttgcacttgtaattccaactgcttgggaggctgaagtgagaggatcacttgagtccaggagcttgaggctgcagtcagctgtgaattgtgccactgcactctagcctgggcaacagagtgagaccccacatctctttaaaattttttcaaaatatttaaaatgatcaaaacgggcgaggcgctgtggatcatgcctgtaatcccagcactttgggaggccgaggcaggtggatcacgacgtcaggagatcgagaccatcctggctaacacggtgaaatcctgtctctactaaaaatacaaaaaaattagctgggcatggtggcaggcgcctgtagtcccagctactccagaggctgaggcaggagaatggcgtgaacccgggaggcggagcttgcagtgagccgagattgcagccactgcattccagcctgggcgacagagtgagactccatctcagaaaaaaaaaaaaaaaaaaaaatgatcaaaacaccagaaaagctgcatacacagatatacaaacaggtggcctgagtttggcgttgaaaagtttcaatttggaagatgttacctcacacaatactagacagctttaatgttactcatatattaatttacattttctttgattctcagtaaaaggttgctggacattcttgccaaattgaaagttttggtagttgtgatttttaatacaagtttttgtgttaaatagattattttaattctaagtggcaatagcttcaaagaggaaaagcacattcacttgtaactgaggttggctttattatattaggaactttattccctagggtttcataaatagatgtactgcttaatttattttgacttaaatggagctagtttcaaattaaaaggccaagcaatacagaggatccatatcctcaagtatgtctaataccaaggaaacagtttttatgtatttttggtattgttttatttactatatagattacttagagtttataaaaaaatctaatgcctcctttataagtaattttaaatcattcattatattcttaaatttataatttgtcagagtgaacattatttttggaaaaacaaatcatctcttttaaacgctatatggaaaaaataatttggttttgcaaaattttcttggtagtcacattttacagaatttttgttgtctgaaattagagtttcatgattttaatttaagcaggtagcaatataaaatacttaacattcccatgaattacctgtgcagcccagtttctcatgtagcattttaatatttacctttgtcttatgtatatttaattaaaataagcatgtttcctttaataagtagctttttaaaaatgaatgaatgataaatgaactgaaattcgtctgaaaaacccatatgattattttttaatttatttaaaaatagaatcaatgcttacattttaatacatttggattcacataacttgaaaaattttagagattaccgaatatagattggaatcattaacaatattttaaaagaataaaggcatgtataatttttatggttcattaatgtttaatgctaaaagcaagatatacagttgaatatacactatgactctaattctataaggaagtatgtagtccataatagtcacatactatattgcatacatgtgctcacatacatgcagtgggaaaatgttatcaatagttatctttgaatggttctttaagttgttctatatctcccaaagtatgtatatgtatgcatgtacttcatatgtgtgtatgtatatatatacatacacatatgtatgtatacgtgtatctatacatacacatatgtatgtatacgtgtatctatacatacacgtgtatgtatacgtgtatctgtacatacacgtgtatgtatacgtgtatctgtacatacacgtgtatgtatacgtgtagctgtacatacacgtgtatgtatacgtgtagctgtacatacacgtgtatgtatacgtgtagctgtacatacacgtgtatgtatacgtgtagctgtacatacacgtgtatgtatacgtgtagctgtacatacacgtgtatgtatacgtgtagctgtacatacacgtgtatgtatacgtgtagctgtacatacacgtgtatgtatacgtgtagctgtacatacacgtgtatgtatacgtgtagctgtacatacacgtgtatgtatacgtgtagctgtacatacacgtgtatgtatacgtgtagctgtacatacacgtgtatgtatacgtgtagctgtacatacacgtgtatgtatacgtgtagctgtacatacacgtgtatgtatacgtgtagctgtacatacacatatgtatgtatacttgtagctgtacatacacatatgtatgtatacgtgtagctgtacatacacatatgtatgtatacatacacgtgtatctatacatacacgtgtatgtatacatatatacatacacgtgtatacttatatatacatatacgtgtacatacatgtatgtctacatgcatgtatgtgtgtgcatacatgtatgtctacatacatgtatgtgtgcatacgtgtgtgtacatgcatgtgtgtgcatgtatgtatatgtgcatgtatgtatgttgcatgcatgtatgcatgtgtatatatgtatgtatgtgcctgtatgtatacatgtatgtatatatgtatatatgtgcctgtgtgtatatatacatgcatatatgtatatatgtacatgtgtatatagatgtatgtatatatgtacatgtatgtatatatacatatacacatacacacacataaagatcaagtaggttacattatatgtttgttttatatgtccatacttctatgaagatgggtctagagagttgtgagtagacgtggtcctcctatagctaatccttgggtgttgtcaaatagtctaggctcccagaaatatttttatattcattttaaaattagaacatacttgtttctctataattctaaaagaagttgtcaagggtgaattgatagatggatgatagtttttaggctgaggaaagaaagatactaagatttcaaaattatcaaaatcttggactttaaaatatatttcaaaaatattattttaattttctatatgtttatcaatttcctaatcctattgacaaacttcagaggagaatatctttctagtaagagtgagtgaagcacagaagatgaaaaaagtttgcacaagattccattcggccagcgcggtggtgcacacctgtaatcctaggcaccccatagactgagacaggaagatcacttcagcccaggagttcaaggccagtctgggcaacatagcaaacctccatgccattgaaaaaaaaaaaaaaaggattagattcaaacgtaagccccagcctgtgactccttcacagtgctagttcatgcattcatttgtcatgctaaaatttgcaatgtgtgatattcaaaagcagtgggtcttacatggccactaatgctttaaatatagtaggattaggggtctttgctccataaagtaaaaactttcttctaattaactgtatctccttttccttatgatttcgtaatagtaaaacagataaagattgccacctagtgtgtttaagatttcaaccaatcatgaaatgaacttctataggaaattatattttcaggtgctgatgttggttgaacttatttttttaagatgacaacaggctttttcatttttaagtacttgaaccatatatggatctcaacaaagtcaccataagagtgtgggcatttggatttcttgcttttagtttcttgcttgtttctgtttccttattacagaaagaaaaagggtagaaaataacgtgataaataatacagaagtagaagaaggatgggagggggaatagagaatagaagttcctgactctactgtcatttctcttgtgagaaaaaaaaagacaatagtatactgttgagccctgtattctcctgctttcaacagcgctggctcaggactcagcaagtctttctctttgggagagacaaggctcgccaggactagtgaagatgactctggttcacttcctggtaaccagggaaggtgacagagcatgtggcacctccttggacatcatgaaatttaaaaccaatgtgacactgactcccacagtgacctacagtggctcatcctggctgttctagaagtttctgcacttgcattctgctgtgactgttaccttggtaccaatctcatctctcacatacatacatatgtgcatacatacatacatgtatacatgtgtgcatacatacatacatatagacacgcagtgtcaaaatgactttttttctgagccttcctatccctcattcattctccgcctgtcctccatgaacactccagttcttttttttaaaagagctgtattttccttaaaacagatcacagctgttttttgttaagggttgttgttgttataattgtttttatttaaatgaaagacagtattgcatcatcctcacccaaaattcacattaccaggcggtacaatttcaaaatgtccaggcgatattcactgtgtgactttgaatctagcttttcagtcactttatagagaccctaatagtctcttcccatctcagaagagactcagaaaaatatttagccaagtaggcctaggaagccccaatttattacattgtattgtaatccctcccagccccactttacgtggcaaggcgctttaaaaagcttctgtgggtaaagttgttcaggtgcaagatttcagaattattttatttcataggatttttttgagcatatgtgattattcagttcattaaaacccacacatactttaaaccaaatcatattcacaaagtgaatcttctgttgatcttaactaccagatctgtttttaaatgattataagcaaagtgtaagacacaattcaaagatatgtttgtattatatttattttcttctaaccacaaataaaaataggttttacttgccttattctcctagtgacagtatgtctgaaaagatctgttttaatattgagttgaggacttagacaaagattttaaaattatatgttaggtatatattcaaagataatttaagcatgacatacttttgaaaataaatggataggctataacctgccgtttatcgaggacatctgccactgaaatgctaggtatcattttactgttactaaaatgagaccatcttgagatatttggcagaaacaatttctgggcaatttattaaaaagtaatatatttccttcactaaaatgataactgtctttatgctttcatagggaaaaaaggctggtaaattatcataaatattgtaaagtgtattacttataatacttataaaggagatacaaccaaagagaaaattaaatgttttaataaatatgcaacccttttgagttttgaaagattcaaatccactgcaatctatataaaaaattaggagacatatttccatggattcatttcagattgatgatgtgccttgtcaagatgacttagtcctgaaaaaaataaactttatagtaggtcaattataaagaataaaatgaaagaagagactatagcttgggacaataagaagatgtcatattattttaattttggttatctgaactgcctctcatccattttacaatacaatgtcttcagcttggccatgcactgaagcagatgaatagtttatcagactggcaaatcaagtcggcataggtggcatgtcttttctccttgtgtaatatacctcccattatggaatttttaataacattttttaatgtcagaaaccattgaactatcttgaatgcaatatatgtagtatatacacctattgaaaatgttttttgtcttcggacttctaacacactacacagtttactgatttgtccaccactcccaagaatgtttggcttcaaatgaactctaaaggtgcctttatgtgtgtagaaatttgtcaaatgctgaagtgtttagctctggattttgtcttcatgctttttaaacactggtgtatctgtaaatatttctcagttgttttgtgagagttaggctactgtttcaaaataagtacataagagaaattgcagccctatatttacctatatgacacagccagaagggaaagtcagaatgatgggccaaggaagaaatgtagctggccaaccctggcatcactttgtaatttgcatttattgggccattttcctagagctttatttttaatctttttaagctgttccataggaatcagccaatgcatatcacaaaaggggaccattccaggtatggctgtgcagcttactacctgcgtgtctttgtgttaaatctcttaatcaatttgagctacaattttctcatctgaaaaatgggagtaatgtcacctaccttgcaacattgttgtaacagctgatgattgtatataaaatacacttgctgtgataacattctttttacttttgtaaatgcttgaaattttcatatctttttttccccagaactttttctttcccccagagcttttaatgctgtcatcgtccctctctctctctctctcaactaccactgatttagtttaggtcctcatctcttcttttctctacactggtctccctgcttccatttttgcccctttaaagccctcaatcttttatagacctgtcacagggtctcaagagtccttcttagcgaagtatcagttttctgagtctttgcaatttcctgactgcataggaaagcaaaaatcattatgatttaaaaggttttactactgctgctaattattattatagaaatgtttattgaacatttactgtgtggtaagcacatttttcagcacttaacattattaatttattgaatcccaaaacatcactctatgtatgtgctgttatctccattttacagatgaagaggccaagggaaagtgaagtttaataacttgcacaatttcacacacctagtatgtggcagagctgaaattccaacccaaacttccatcagagagtaaaatccaagttcttgtacatttcatacaagggctctgtgatctgctgcctggctcgttaccacccatgattctgaatttcctgccttccatggcattctctagaatcaccgagcttctcgttgcagctctgtatctgcttctttctcatctaggcagctgctctgcctccttggcttcatccctctctgctggctcccacgggctcaatggcctccttgccacttcagtgcaccaggcctgctcctaccctgggccattgttctaggaaagagcctttctgggcttgacctcagaagaccttttttttttgagagtcaaggtaaattatgtaaattatttattgatgacagaagaacactatcttagtccagtttctgttgctataacagaatagcatagacagggtaatttatatagaaaagaagtttatatcttacagttctagaggctgggtagttcaaggacatggcatcagcatctgattaggatatttgggatgcatcatcccaaacaatggaaaaatggaagggcaagtgagcacatgcaaaagagaaaacatgaggggctgggctcactttataacaacccactcttatgataactaaccccctcccaccataacagcattaattcattcatgagtgtgaagccctcctgacctaattacttctcacaggcccccacctcttaatactgttgcaatggcaattaaacatcaacatgggaaaatacctttttcaattgacatcctgcctctaccacttattagtttttagaccttatgccctctctgaacctcagttgcctcttctataaaatgatcataaaacccaatgtcctaccttcttagagttctagagttctatgaataatctctacaaagagcaggtgccccttgaaaaacatgattctggaactaagggggtgtaaaataacacatgcttcctttacattgttttttccttcttctgcttttatttcccacatttttattttcaagatctccacatggtttgatgacgaccacagcacctattctagctattggtaacaatttattgagtaacatcatccatatgctccctgtgccccagcatgtttcatgggtgttgttttgggtcactcaggttgttttcagattgttcatgagtgagcgaaaagtttatttgcactgttctcagggccatgtccagggagctgtctgtgttgaataacagcattcacttttgatttaagaattttatctagctagatcaagaaatagctgatggtgactctggaaatccttgtctcaaattattcatgctaagaaataccacaaaagaaccctgggccccagtttctcactttcctctaactggaatgttgcacaactttccttgcccttccctgtccctccaagacacgtcatgctgacaccttgctcccataccccaggcacggtgtagctggggttgctgcagcaacagcacacaaggagtaacatttcccagtgactacagtggctgggatgagtcagttgaacatttcactgggtttttattagtgtatgatgcagtcccatgtcatctacagttcctagcctgtccaagacttacacgggatgatgtggaacactccatgctaatcaccttcaaatattagatggtcaagggttctctcactgaagtcactgcattgctggttccttccacagcaccccttactaatatctacagtaagaggccaaaagtaaaactcaggccccactgctggaacaccatttctactattgcatatcctgtgtgcctaaaaagcaacagtgaccctggctgatgatcaagaagcccctctttttacccagggagttggacaattgttaacatcccagaagacatatttttaacccagttgctgggaagaacatgtgctgaagtataaggatggaatcactgtaattctctatgggaactcatgaaagtggaacttgccgtttaatattgaacgacactgagcacagagttattgatgatttctaatgcgggatttggtttatttttcagacacggagatgacttgattgtgactccatttgctcaggtaagcacagcttggtgaatgggcaggtttctcacagatgtaaaaatttaatttggggaattagttcgggttattaatttaatttaattttaaatcaagcacaagtacaaatacaaattcttggttcattcaagcaattcaaaagcaatgctagagaaagtgactttggctatattaatctgtttcctataaacccatagtaccaaagagtgtctttgcttcaaataataaattagctaagggatatacttaattgggctcatactgacataagcactagaagcagaaggctatatcatggcttaagttatgtttagtataattaggtacatgatcagtgcttgaaattcaatattccaattcaacccaataccttatttatctcttttttacatatgccatttgtgcagagatttagctgagtgatgtgttgatgtttacttcttccttctaggcatacaaatcatgaaaatactttaaccacatgacatatgtgcaagcaggtgataacatgatctaaaatgtttgggaatataaatatgaaagagttgatgaccagatgttctatgtatagaccaatacttctcaaccctacctgcacgttagattaacctagagacctcttatcccagtgcccaggctgcagccctggtcaattaaatccaaaaatttggagatctgttacaagcatctgtatttgttaaaggccttagtatttttctagtgtgcaggagaagttgagagtctctggtatagacaactaagggcggaatgagataaaactgatttaacctggggcatgaagcaggtttaaaaccaacactgatgagtaagaaatgttaaatattaaaatgcaagtaatcctgagaggttgtaaaaattataatcaggcctatatcatacatcaaggtgctcttgcaccttggacaactcacttaaattttctgggtcctcttttttttcaactggtagagttaggggactgagctggatgaaagacagtcagatctagttaaaaccctttcaccgcctcttgccaactcaatggacttgagcgagtcactgaacttttccaagcctggtctcttcctctgttaaataacagttccaagagtacccacctcataagattgctaagacactgaaataataccacgcttataaaatgctaggcacaattgcttgaaaatataatattataaaaactttgtgattggtttaaatgtatagagctgaaaatgttctttcatttctaaaatgtcataagtattattttttaaatggataatagggtttagatagtaggattatgtatagttctactttttaaaactttccaaacttttattactgtaacttagacctataatataatcaattcataagtaacataatgtataatagtaactttttaaattaatgcaggcaattaaaaataaaatacaatcaccatccttttcagatggttaatatcttgtttgctgaaggttttgctggagattatgaattctttctagtacctgtatttctgtgtccaaaaaatttacacttgtatgatttaataatatgatgtgatagcaaaatcttataaagctgagggtttttaattgattactattgaaaacttatggccgggtgcggtggctcgtacctgtaatcccagcactttgggaagctgaggtgggtggatcacctgaggtcaggagttcgagaccagcctggccaacttgatgaaaccctgtctctactaaaaatacaaaaaaattagccaggcatggtgacgggtgcctgtaatcccagctacttgggaggctgaggcaggataattgcttgaacccgggaggtggaggttgcagtgagccaagatcatgccactgcactccagcctgggtgacagagcaagactctgtcaagaaaaaaaaaggaaagaaagaaaacttataattctatatctaagacctgagagagaggtgaacagacaaaatatggcataacaatgtaagtaacatcatcaaacatagaaccaatcattccaatttgagttcattcaagtagctattcttgtttctaaccaaatgatctaggtattattataagaaaaaatatatataaatatttaataacaaatgaaaaaaggtctgtgtatgatatatggtcttttacatcaagtaatatttattaagctgcaacaaatagattagtaaattggacttgaaccctgccatcagtgctcttaaattccaaggaaatctagtcttttacctgattagatattttctgtagtgtacctataatctccaaggaaaaaaaactaatggaatttcaagatattgggaaatacacacatatatgtaatttagtccatgttagtaagctatttaaataaaaaagatgtgtacttaatatacttgaaattagaacttggaatataaatcagctgtataatttataggcatatctgatgcctaaaaataatcccatagtatattaagtctttgcttatgattagctaagtgactcataacaccttgtagagagtggtcattacttgagaggctgccgattttttttaaggggcttcatcatggttttcacaaatggccttttactggagtataagacctggaaagccccactagaattaaaaacaaaacaaaacaaaaaactgttaagccctgaagagtttcaccactcttcatagagcatctgtggggaggggttaagagagaagtcccagtgagtatgtttgagtggccttctcttaaaccctgttggacatgattggcatgttttgctgacccaatcactaacttctcaaattttctttaatacaaagtaaagcacttaccacttaatggtaagtgctattttagcattaactatttaaaactaaaaatataagatacttatgtcacttgaagtgataccaatctaatttgtcctgatataccataattgctttcaccaaaggacagaaaacaatggattttagaaaagtcactcagaaaaatatttagccaagtaggccaaagaattaccctcttttctcagcatgctttgaaaattggaatttcacactaaattccagtgaaaaagctatgcttctcaaaaagacaaaacaaaacaaaaactttttgcataaaagtttagaaaaataataagaaaaagaaaaggaaaattttctaaaattccaaaccccaaaataactgctactgacattttattttatatcccttcagatttatttttctgtgcatattttctgtcccatggctcctaaaaatggccttcccctgtctaaggtgttcaaagatcccctcccaaatccatctcatcttctgcctcttcttgagaactcatttctttatgcctgagtccatctccaaaacacgaatcatggtttccaaatcatggtttcctttgacgtgaaaagagcaaaatcctaaattagaggagaatttaggaagccgtgcaaagatagattgcacttttttggccaggctaaagcctgaaacatcttggatagtaattttcagaaaggatcctatagtatctctccatagtttatcccattgtctaaaacactgtcagggctagaaattcttgctggtgtttaacctaaactcttttccacctctgatttcttatgctttcccctgtaagctcagaatccctttggtcctcagaaaaagtgacagctttaaatatttttcttatttcaattgttaaagtattctcttgtgtttgtgttgaaatcttttggtgtgggtgtttccttagcacgaaggctagagaggaatcccactggagtgcacgcggcaactgacctttttttcttggccagagttcttgggggccaaggagcactaaggaggcacaatgctgataaactgtaggaaactcttctctgctgtcagctgcctccgggctcagtgatcccaggatttgtgacacaactaccctgtagtaaaactctaagttgactagaattttcatgtggaagtgtgtaatgttaaatgaagtagactctgatgaaagaaagagaaaacaggaaaacccaagcattatgctggatccctggagaaaccctcacttcattcagactaaggagatatccctgatttgaaaatacagaggcgggagaataacttgaacccaggaggcagaggttgcagtgagccgagatcgcgccattgcactccatcctgggcaacaagagcaaaactccgtctcaaaaaaaaaaaaacaaaaaaaacaaaaaaaaaaacggggtaggaacaactacatctctttacctttactctaaccaaaatacagcacctgggatacttctaggataaaaatgcagtagttattaatactatagaatattaccatttagttggtaataaaatataaccaatattctcatattcctgcctgtccctcagccacttcacccagcagcaacgatcttgtggcctcatcaccatcctcaagcttgcagactgtgctaggccctccctgccaggctatgaaagaagatagtcacctcgtttcagtcggtgctaaatttttagcttttctttagccttaattaatttaaattacaactactatcttctggacatctaagttctttttaagagcgaaccatataaaattgtctatcaaccttttctggtgtacaaaccagcaatttcatagggtttaaacaaaacataacctggaaagaggttttcttttcataaaaatgacctttctattttgtaaataagcataacttgactccagctttttccggaggtaaaaccgaagtaatgaatctctcccagtgcgggtcgccgcttcctccgccgccagtggcacctcaacctcatggtctgtgttttaccgccatctagtggtaacaagtgtatatggttatgaaaaacaatcctcgaaaccatttattttcctctttttttttaggctatgatgttcagctgtttaagtgttaaatgataaccgtattttcctgctattttcagtgattcttattgtttaataaatgtttagaagcacctaagaagatccgagagtagtgtacgtaaataacattgaatccttccccatgggctaatacatgaaccatctttgtctaaaatttttctgtaaaactaccagtatttccttcctaaggaatatatatttctcatcattcccaatgtaattttgacattgactggctatacttctgcttggtggggcagaagagaaagaaatgaccttaattttctaaccattgagctctgtggaagaaacgtcagggatctttttggttagcaagcattaaggagtaaggacaactgtaaaaggagccttaaagctttgactacagttcttaaagagtcgaattcaggggaagtgagggctgccctgaacaaaagcaaagaacaatggaactttaacttaggggcttcagtaaaactgtttatagttctccccacagcctgcagtaacagatgctccctctttgtgccctgcaatgcaaagtgaaagcttaaaagactaacacagtgataacagtgatgacgacaccaagagtcagtcagcgaggcccaagacaacacccccttataagatttgtctagaaatgttatttacacttctgccaatagcatacatgtcatactgtagaagataatagttaacaccaaacataaaatttataaaatagtttgtcctgctgcaaaagaaaaaaaaacccacacacacacaataaataatctaatactggcatgcctaggaaataatttctctacaagattatttattgcaacagtgtttgtacaaaaacaactttaagatagaaaacctaaaagttgattgctagtggccaggcagctgattgtctgaaggagagaccggaagacagattccttttttcactttttattttgaagtatttcatatatataagggaatatagcttgtaattatgtaaaatataaagaataatactaaaatgaacagtttaagaaatagaacagttatcagtattttaatgtcccctgagtgtccctccccaggttaatctgtttctattgcgtcttttcagaagtaataataattttgatttttatcttaatcattgaaggggagactttttgctttatactcttttgtttaaattctgaagcatgtgaagatataaattatacaaaaatacataaattttaaactaaaaaccaagacaaaataatattaaattagattacttattaaattagaagtttattataatagaggcaaaaactcctctacagaaattttttctttgatgaactaatttttcttttcatgactgatgtttcccttcaaatgatcatagaaaataagttgcctgcatttctatgtctatttacccagctgtcaactgcaatgaacttaactattatgtattggaataaaaatctcagaattctagggttaaaaattttgcctaggaaggggatcaattagctggtgcaatgattttatcttaaagtttccattagtatgtttgatattcacttcttaaaacataaattaagcctgcatgatttaacgacagtggatcatttatccgatttacttctgcatcattcaagatttcatgcctaatgaaagacatcgtggtctgatgtcagcagtcggccatttgaatactccatcataggcagcgtgacctttcagagccgtgggttgtttatatgagataatgagccaggtttttccagtgactgagttaatcacggttggcttcttaggaagcagcattaactcctttaggggaaaattctctaagtcactgtcccaaggcgtacacagctctccattgacttacacaaatgaatgtcaatttcataaacagcaacaacaaaacagagtctgggacatttttgtcttagaaaaaaaattagactgattttagtctaggtctgtgccagatgaaacatttctgaaaacaactctggaaactttgaagcaattaaaactttggagactcttgaattaccaatgctaggcattaagtaaatttcccaagtgcatgccaagtcattaagtcaaaggtaacgctgccatcatgggctaatattggctgaatgctttctatttgccaggcactgttcttggcaccaaacctgtcattccatatactcctcacaacaattctacgaggtaggtatcactatcccagttttccaggttaggaagctgaggtacaaagaggttgcatatctagtccaagttcacacatttactacataacagagccagacagtctgggttgttaggtaatacctactcagacatttggaatctgtgttttacataaacttagcactctagctgtcacccaaatcacctataatcccatctaatatgggtttgaccctggggaaacttgcccatttcaggagaaagagaggagggaagaaggagataaggctctaggaaccttctcctaggctcacttccagtccgttggctactttctagttccaactggaattagaaaaagcgactgttagagatagtgacacctattggtcctgccttgtcatgtgtgtgggcatgttgtgtctatgtattcatttagtcaacaaatttttattgagtatcttctgtgtgccaagcattgtgcatgtacagggcgtagcattttacatgagaaacgcatccctgagagcttcttacaatgcacaattcagataaccttaacaaaagaaaacaatgtctgcttactagctagagtagccatgtggcaaaggtagaaaaacagtttaaaattcacttcacttgccaacttattattatgagattcttcatcaatttttgaagagatttgggagtagggaattttttatccctaaagtgagctttattagcattttatattatactatttgaaatgtgcaaaaatgcaatcatgttatctgtgtattgcctggaatattgtcttggtgactaaggaacccagaaatactgtggaaactgctgctactgtcaccatgtgcatagacaatgtggagagatttctggaaaatttctgcagtctggcctctctggatttcgtgtggatacctacaaactgcactaagtgttgggagattctttagtggtatatgaaactaagttgcaagcaatatcaagttttctcttaacaaaccattttcaagtgtatttaaaatggccttagctcaagaagtttcaagaatcctttcttgttgtaggtcttggccagtctgcgaactgtacgaaacaactttgctgcattaactaatttgcaagatcgagcacctagcaagtaagatatccttttttcccccctcttttttgctgaacttttaaataagttttctcaacttgattgagcccaaggcaatatgttagacttctctgtgttgttgccatgttgtctgtgtatactaagtcatatgatgtcctgttaattttctataaatacttcgtggtgatggttctaatatcagaaatgaagcagtatgacaaataaatatggtgattccatctgtcagaaatcacctggcatgatcagtcctccgcccagttatttacactcagggtaactttatagtttcggcttacttcataaattaaccgtgggtgaataatctcatcacaccttaagatcagctgaaagtcatcctctcaagacaacgatgatttggagaagcgccatatcatagcaaagatctttgattctcctgctgttactgactttcagatcagcagcattcatggagcaattaatagaattgtggtttatatgacaacagggaaagcatttgaaagatgggaaaggattatcatttcaggttcttgataaaggcaaaaaaatctaaaaagataaaagtaatttttcaatattaaatggaaaactggtttgctgttatttcaatgtccattttttttaaaaaaaatctgctattaatatgaaataaaatattaaaatgccaacttcaaataattttccagaaggaaaaaaaacatttaaatcatattaagaggatagtaaatataagtgtattaggaactataacttacctaagtgcataacatttcatagtagttactacttcttaaaaacaatgagaaatctgaactttacatttcatagtaataaaattgacctcccagattcacgtttttcattatcaaaaatagctctggccgttattcaagtacttcttgtgatagaaaaaagtttttaaaaatcaatataaatgtaacaatgcaagctattggaatggaacccattaggttctgtttttccaggtaatgaatttttgcagtcctattctctcagcctgaatacttctcatcttcttcttcctctcctcatctactgggataattgtcattcattcttttggttgcagcttaaataaaatttctcttggagcattgtccctgatgatacccaacatagacacacacccacaagccctaatcaaagtgatgtgcctttccatctctgtctgattgtaccttgtacttgattcctatgttagcacgtagctctctgtgctcctgttgcctgtttgtctgttgggatgctcctgaacactgtcagttcccagtgagtaggaatgtagtcggttcacatttgtattccctgtgcctagcataatgcagagtctatcagtctgcaaaggcctgttcgctgaaagggcaaagtagtaactcagcatgtaaaatctgagggcatgctttgaggtacctgttcattaccaatcacgttttctatgtaacgtggccgtgcaatgtcatactgacctcagcggcccccttgggctttggggatttggtagcttgtaaggtcaatcacctcccccttagaaagtctcagctctgcagaagaaatgaagttaactggttgtcactcccaaactttttagtctcgaattttacccaggaaactgagatttttgtctttaaaaagtgaacaagaaactccctttatgcttcctttacatgtggtcacctgggtaccagcatttaaatctgtggcaggtaaatagttgatcagtcaggctccagagacgatctgaggcctgtttctatgcaagacagaagttttcagctgacatacagggatggaacagattgaaatggaaaggaggagctagaagaaaacagaaaatcatagcttgagcctgaacttcctctctgccttgtcaatgcccagggtgacatctaaccaaacagtattatctggcagactctaagtaaaggccactgtggtcttccttttggtcaatgcaaatttgtgcctccattactgattcaaaccaaatcggcttctttgggtatcagaatagtaggattcaatctattcacggctaaactcgattctgttcagtgagaacaaagtgctgtaactctgcctcatcacatgatgaccctgggagaatcagaacctttcctgctgggcactcacagagccactagaacatttccaagctcatccttggattttatggaaggcatgtgctcctttgcacaagccaccctttttatttgctgcagaaaaggagtctaggaagaatgcattccaaacccagcccctgggtgggtattcagatgcacattgctgacttgttaacacattactgcttcttgtcaccttgggttttttgtttttgttttgcccttgagattttttattccagaagtgagttctggctcatctgtcattagaggaggtatcgaggcaaccatggatcaaagtattaatattttctgcttgccattacttgttcagatatcaagttcctgagtaccagttaattgtaggattgatagtaaaaggagataattagaattgagtcaaccatttggttttccaaaactgtagaagagtgtgaaaatatttatttaataccattcccagacaaaatcaatggtttctaaattttcacagagcaaggactaaaaaggagtaatcaggatatcaattatttgaatgataaactcttagccagaaggtaacagataacaccctgttacacacagcaagaccccatctctaaaaaaaaaaaaattaattagccaagcatggtggcatgcacctgtagtcccagctacttgagaggctgaggtggtggggggaatcactagagctcaggagttcaaggctgtagtgagctatgatcacaccactgcactccagcctgagcaacagagtgagaccctatctcaaaactttaaaaaaaaaaaaatttaagaagaagaagataattactggtatatagaccagagctatttcagagcagctgcttaaaatattaatattttggtttatcgagtttaaattctccccatttttcccccaaccattttattttataactaaaaaaaactaaaataattcagaagtaaaatttggtgcattttcaatcaaacacaaaattttaatcccaaatcgataccaataaccttaggagcaatgaaagggagccagaggctgagtggaaccagtgagaatttacaaaatcccaggctgctttccccaactttcccccaccctgctaagaaattcatcatctcagcaaggcatatttgaagagattgatgccattggcacatatgtgaggctgtgcatgcaggttccacaaaaacatctcaaactaaggcagcaaagcagagcatagaccctaggatcacattcgtttagttcaaatctcagcttcgttacttaaaacaagttcttcaaattctcaaagttttgtttttctcattggtaaaatgagaacaatgaaacttacttccttaaggcttattgtaaggattcaatgagataattcatttaaagtacttatttagcaatgtctgatccacaagaagtgtttattaagtgttcacccttggtagaggcaatatatatataattattatatacctaatatatatatatatatatatatatatatcagacatctttgaatgtatctaaaagtgttttttaatcattatattttaaaagctgtcagttacaagtaataactttataaagttatatttcaaaaatgttgatggatactttataaatgatattcttttcaacataatttattaagcactgacggaatactggatgcattgtgctaggctctgtagggaatataagttaatcagacagcatgctttttttttttacttcaaggggtttatagtcattttgtggaacttggcaaacatctgaaaacttagagaacacaagatagaatttatttaagtacctttggcttagagtatttctaaagcttctatagtatctatttggacaagtcattaatatacctctctaacaaatatatcagaggtgtttttcaatataagaaaagaaaggaaaaagttcaaatagcttctctaattataagatagtttacaacaaatcattcacttctgataatgtacaggcaatcacgagaatttaggccaacaataaaaatttcttaaccctgtattagggaagacaattataaattgactgctttttcaaattcagagtctataagctctggcttcagcgaataaagtctgtaagaatttcctcttctctcatgtcccagtgacacttacatcagctttatttaccccaaatcaatcactgtgagatttaccagttttctttttggacatgtgtgatctgagccataatacaaagaacgcctagggacttgtctggctagtctgaaagaaatcatttgcgtgtccaaacttaaaaataattctttaaagtaaaatgctatatctgaaatgactcagagagtgatcaaatcaataagccccacatatttactgctttgtgtttttctgtctttgtcagaagatcacccatgtgcaaccaaccatccatcaacaaagccaccataacaggtaagaaagatctggagcttattcttcatgtgtctaggaagaaaccatttctgccaagagtcaatataacaccaacaccaatttcatgctgcaatttgaaaatgttaaagaaattctttcttctctacattatcatttctatcattgatctcacaaattgtctaagctgttatttggaacatttttaccgatttacgttttttactgatgtacattatttttaaccatttaactatgtgcttatactcatttgagcattgctctgggcatttgtattttgagagatgatgttactttcaagtcacttcccattctggttccacacatgtgttattagcatgatataatatgtcatcatttagtttaataagagtgaaggcataaataaaaggagtaacgtgttggttcatcaatatcccacttgtgtgtaggaagcaacattgtaccagtagtccaataaaggactgagagagctgagaataaactcagtttgggaggggagagaagttaatatacaatgcagaaaaagttcaatgagatcaaaacgttgggatctatagatgtttgggaaagaaaaataggaggaaagatgagaggagccaagtgcataaaaataaaattatctcaattcctattagtctgttttaggcacaggacttgaccccagctgaaccaaaaacagaatgcatgatctcattttgctgaacctgaaaccaaattgaactcttttgactatttcttgaaaccccaattgattcattaaaataattgcctggaaaagaaaacctatgttttctaaaattattaccagaagaaaattagcatattctccaaactaaaacaattcgtcattggattcaagtgtcttccttgagctccaacccataatgtgctgaggagctcttattaagttattagtgagtacactttgcttgaaatttaactttatcatgtccagacgtctgtctgtgtttgtggtcaccacattagagttgattctggaatcattgttaatgtcatcttttctgaatgtcatcaagtgaaacttgtatttcaatgaatgttaaattattgatctcttcttcatgtttctctttcaacatattattggtgatgacttccaattatcattttatagtacatatatggttaaccagttttgttcttgatattgatcaagagatgaacaatagggccaggagtggtggctcacgcttgtaatctcagcactttgggaggccaaggtgggtggatcacttgaggccaggagttcaagaccagcctggccaacatggcgaaaccccatctctactaaaaatacaaaacttagcatggtggcgagcacctgtaatccaagctactcgggaatctgaggcaggagaatcgcttgaacccaggaggcagaggttgcagtgagccgagatcgcgccactgcactccagcctgggcaacagagtaagactgtctccaaaaaataaagagaaagagagatgaacaataacaattcctatatgctaaaataaatactttgagtaactgatttcttctgccaaaattcaaattcaacataaatgagtctaaactgagttggaggtgtggaaccggatccctctgtttctatgcactttcctaagttgaggaatggacaggcctacatttatgaacctgtacctgaggcctctagtgagagaagccacatggaagctggtcttcacgctgctccaggcactaaatctgacccctatcaagaggaactaccctcaacccccaattttgcaataagcaagaactgacattgctatttgggcagaatgcagtgctattttggtccctggaagcttttttagcttgaggtcacatatgagctggcctcacaggtggagcagcattctcccagaagagcagcatcaggtaccagtggaaattgttgtggctgacaacagatggttgggtgctcagtggtcagggcagctgcccagccatcccagcagatgccaggcacagattaacaggagagagtagctacactcaaagggcacacacttgatcttaagcatatgtgacagacctcatagaagctcctagaaatgtatacatagtaagggggtcctggagcaataccagagggaattatgagccacagaaattaagaaattaaggtgaatatggcctcattcgtacccacaagctcctgacctgaggcctagggacaagggggacacagaaataccttatctagaaagggaaactaattaactgttgttaccacttagtgctgctgggctcctcacaaagcacaacaggaaatgaactgactaaaactgggaagtcgtttttcttgcccaagcatagcaaaccaaggtgggaacatggcatagggatggagggatgagggcagtagcaggggaaggttcccctttctgagcccattttgaaaaagtgggcccttaaaacctcagtgctagtaataataatgatggttgagattttgacattagtaagatttgagacactcagaaaaggcagtgcttgtgcctttcctccctctgcagctgaccactcaggccccaccctctaggctcactccccctgaagttggaacctggctgtaccgtggcagtagtcctgggaagggcaaagaagtattaaaaagagtcagtgaggcacccttaagatgaatgggtccctgttgataggggtcagacctagtgcctggagcagcatgaggaccagcttccatgtggcttctctcactagaggccccaggtacaggttcgcaaatgtatgcctgtctatccctcaacataggaataaggtctagagtaacagtgtagcctaacagttaagttcatggctgatccaaaaggctgctagagcacacagctccaagtgcctccggagggcaactccacagaacatcacaacatggtgcccctagaattataccacgtggttgctctgcctacccagcactcaaatcatgctctatcatgagagctttgtggccctgggcaggttgcataccctttctctgctcagtttccctacctataaaatagtgacactgcttcctgcagttgttgctggcttgaatgagtgaacacgcatgatgcccttagcatagtgcctcacagaaccagcacttaatacatctttttaaattccattttgttgttattacttggttttgtttctagggcccactgtatacatagaactaggggtttcttcatcaattcaggctgccataacaaagtaccatagactgggtggcttatagacaacacaaatttatttctcacaattctggaggctggaagtctgagatcaggatgccagcatggttggggtctggtgagagtcttcttctaggttgcatcagtgccctttgtaaaggcactagtctcatttgtgagtgttgagtgctccaccctcacgacctaatcacctcccacaggcccggcctccaaataccaacacatattgggttaggatattgaaatgaattttaggggcacacaagcactcattccgtaacaagggggtaatggaaagaataggacaaagacacaaacgaaggaaagggaacagtgagagaaaggcaagcttgcaagatcatgagaggaaaacttgtgggtccttaaattggccaaaatggatgcgcttgctttgtgcccatcaaaatggggtctcctcctgctcccagcactgtctcctttattctcatcacaattcacagacgctggtagctttgtgatagagatgatacactgttgttcaggatgaatttctaagtctaagaactcacttttgagtcatagttgtttgaaggagaaatattaattctctatcacttttctgtaaaccaactctaatttttaaaaaagaagagttaagaacttcagcagtctacatatcacataccatgctttctaaggagttgtcacatagaatttacaataccctcttcctcttttcaaggttattgcatttgacatgtattaaagccaggagaatttgatttttttttttttttcttgagatagagttttgctcttatcgcccaggctggagtgcagtggcgcgatctgaggctcactgcaacctccgcctcctgggttcaagcaattctcctgcctcagcctcccaagtagctgggattacagatgcccaccaccacgcccggctaactttttgtgtttttagtagagacagggtttcactgtgttagccaggatggtcttgaactcctgacctcaggtgatccacccaccttggcctcccaaaatgctgggattacaggcatgagccaccacacctggccgagagtttgattttatagcattagggttttaaagctaggtcactggccagtttttatttcaatatatagtaggtaaacatacaggtctaaaatgatctaacaattccttaaaagtaaggctttgaagtttgcatttataaaagagacttaaatagctcttttgctctttagtgtgatatgacaaagatgatgtgtggcatttggagcctgaatgtgaacccagtctctcctttttgcttcatttcctcattttggagatttgagtacctaacacttaggactgttgcaagaattcaaggagataagttatataaaaggatagagttcaagttgggcatggtggcacacccctataatcccggctactcaggagaccaaggtgggaggactgcttgagctcaggaattcaagaccagcctgggcaatgtaatgagaccctgtctcctaaagtaaaaaaaaaaaaaaaaaaatggaggccgggcatggtggctcatgcctgtaatcccagcactttgggaggccaaggcgggtggatcaccaggtcaggagttcaagaccagcctggccaagatggtgaaaccccgtctctattaaaatacaaaaattagccaggcgcggtggcaggtgcctgtaatcccagctactcgggaggctgagacaggaaatcgcttgaactctgagggcggaggttgcagtgagccgagatcaggccactgctcttcggcctgggtgacagagtgagacaccgtctcaaaaaaaaaaaaaaaaaaaaaaaaaaaagaaagaaaaatggatagagttccgaatgtgatgaggaactcaccaagtgtttcttcctataaccctgtcccaatgcctgacatttttttgttcctaaagctaatttaaaaactggtagaatagaggtaacagagaatattggtatgtcagcttctttggtacatttcatttatgattttgttttcacacagtcatggcatgacatttttagtaatccttttatcatttagagtaaggctcacctacatacgtccttaatgtgtggtgcacaccagaagtaaagagtgcattggaacatgagagggtggcaaagagtcagagatgcccaagccatacctgcactgggacagtgatcccatttttgaagtacagccatgtagcttggagcacagtccttccttgtaagcatttcattttcgaacaaccttagctcaaggcaagcattctgcagccatctcattaaatgttacatcttcacaataccattttcaatgcttctgaatttccatatttccaatatgtttatttaatcatcctcaattagaggattttcatgcaaggacacaactctaaagaaaacgtatttaaatatctttattttaaagatgaaaaaactgagacctagtgagagagggtgctgcttagtgacaatgccaggaataaacatgtggttcctttttcgagtccatggtccttcttacacctttataaagtaaaataacccattagattcgggtggcctttatacccaccgtggaagtatatgctttagagaaagtaaatgaagtattaatactaactcctgagtaatagatgtggcattgtattatttgtatatgagcttgaaaatttctcatcccaacctctcactggacatatctctgtagttatagctattttgattatatctactgcttataccccagaggcatagagaccagcaccctaaagcaaaagacttctggattttgactttggaaaatacaaattcttctacaggagcggtgaaactagtacagctgcctgctctttacctgtagggggagacacatgatgcagtgacaagcatagaacagcacagaagtggttttagtccagaaaataaataaataagtaaattggtctaagtcttcattcctttttgtatttttttaccctgaagattcatggcttcattaaaaacagtaagtgcattctaaatagaatttagtcaattggcacgtagaaaattaaaaagtaaactatccaaataatgctagtctgtcaaaacacaatgagaagaaatttaatcttatatgtttgttgttctaaagcacaagcagtttctaagaattaataagggggaaaaacaataatgatatttaattgggacaattatttttttgttatctgggctaatcacttaatgctttgagcttatcgaatgaaagaaactaagcaactatttcatggtgacaataaggatgctggctacttacttagatctgccttttaaatctgtgtgtgtgtgataaaagcaagtagtatatatagttttttaaaaagaaatatagagagatctaatagatgggagcaagaaccatataaagaaggcaaaagggatctacatgagagaaatatgtaagtcctcaggagatactgaagtaaaacatgtgttgtgtcagtgtatagggaagacaagagacccagccattgccagagaagccctacttcctcatcaaccaccagcaggcagcagcttcatgctgtagttctttttttcctttaatagaataaagattgtggccacactttaataattgccagaaatatgtgttcattaagctttttaagaaatgtgatcgaaaaatgctgatgatacattgtgtttaatagctttaataaaaaactgataaagcatctaatacatctaatgactgtcggatttcctaaatcttttaagctgaaggagtttacttttacaaaaatcctcattgaaaaagaatcttccggtaaaaacattgaactgaaagatttgcataaatgcatggagtattactatttattagttaaacttatgatcttttagagcagtaaaagtcagttctctttcttacaaatgaatttgttttggccttttatgcttttatttaatgagtagagccatacctattaatatataaaaagatcagatctgacaccgtggctttttgaccaggaattgattgaagttagacttgttttaagaatagtgaaaacaagggctatgtcctaattatgaggggaaataatttaattgtgtctctcttgtctgaatatctgatttggatgctttgttataactttaattgaaataattaaatggggctcatgttcatttagcctagcaaaaaggtgatgagctagcatatatgttaaaaacccagctttcctcttagtagttgtctaattttggtcaatgtacttaaattctccaagttttgggggtattctttatcagtaaattctaattcagtgcttaacatagtacttggtactcagaatgtattcaacaaatgttacttatcattattgctataatattattattattattatctgcttggtcaacagtattttccatgcaccttatatatggcatgcatacgctctggaggtaaaatgtgactactggttcaagaaatttacaaagtaagggagaaggaattataaatagttaagtactagctaaatgccatgattgaagcctttatattttttattttaattaattaattaatttttagaaatagggcctcactctgttgcccaggctggagtgaagtggtacgatcttgtctcattgcaacctccgcctcccagtctccagcaatcctcccacctcagcctcctgagtagctgggactacaggcatgcaccaccacgtgtgcataattttttattttattttttgtattttttgtagaggcggcgttttgccgtgttgcccaggctgatctggaactcctaggctcaagcaatctgcccaccttggcctcccaaagtgctgggattataggcatgagccacagagcctggactgaaacctctttaaatatatatatttatataaatatatattatatataatatatacaaaatatataatatataatatattatatattatatattttataaaattatatatatttcttatataaatatatatttcttataaattatataaatatatatttattatatattatatacatatttattatgtatttattatatattatatacatatttattatatatgtattatatattatatacatatattatataaatatatataatattatatatttattatatatataatatatatttattatatatataatatatatttattatataaatatataatatataaatataattctcatataaataaatataatatttattatataatgtatttctcatatatatgcttattatataataaatatatttctcatataaatatatatgtttattataaaataaatatataaaatatatattaaataattatattatatatttaatatataatatatatgaatatgtattcatatatatagagagagagagccagtggctctacctaggaaatgctccctgataaatttgaagaacataatgctttccatgtggttaggggaggattgaggattacctcacaacaaaagaccagcaagaataaggtatggaagcatggaatgcctgtccatatcaggggactgggaacagtaaaggacaaattgagttaaaggtgtataggagcaactgaacaggatgctccagaggtagattaaggaaataatatttgaggcctacataaataacagtggactttattttatggacagtggaaaatcattgagcatttccaatcgtaggaacaaatacacatttcagaatgacagtaattggaagcagtgtagaaagagattgaaaagaagaaagactaggggcagccccatactcttcagggggctgtcacaggccttgtacaggatcaagataatgcagctctgaactggggtggaagtggggctgtggagatgagggaatgggttcacaactcttcagagataggattgaagggacttgggggttgattagagcagagactgaggatgaacaattttaaagtgaaagtatgagccaggtgtggtggctcacgcctgtaatcccagcagtttgggaggctgaggcgggtggatcacctgaggtcaggagttcaagaccagcctggccaacatggtgaaaccccatctctactaaaaatacaaaaattagccaggcgtggtggcacgtgcttgtaatcccagctactctggaggctgaggcaggagaattgcttgaacccaggaggcagaggttacagtgagccgagatggcaccattgcactctagcctgggcaacaagagagaaacttcatctcaaaaaaaaaaaaaaaaagtgaaagtatatatacacatgttcattacagcactgtgaatgtgcataaagggttaaaaacaatccaaattctaaataatgtgtgaattctatttaggtaggggttaaaaaattcccataataaaatgattttaaataatttatttttgagaaaattttaataatatggaaaaatgtttgtattttaaggaatacataataaagtgccatgtgggcaataggcacacatttaatgcactttaattatgtatattgaattgaacttaagttacttttagttgttgaccagtagttagcaaaggtagataggtttaccattttacattgaatctagtgacaaacatgttatttctcaggtcccagttgttagtttgcctctccttgcctagaaagggcactggtgagacccgccctaacaatatttcaatattatggttccacagtccagcattaactgtattttaaaataataatatctctcacatagggcagcattttatggattattgagcctatgacaaaaatgttgtattatccttcagatgatcagaaaaactacccttagggctgggtgcagtggctcacacctgtaattccagcactttgggaggcaagggaggaagatggcttgaggccaggagtttgaggcaagcctgaaacacagtgagacctccatctctacaaaaaattttaaaaattagctagacatggtggtgcacacctgtaatcccagctattcaggaggatcatttatgcccaggaagttgatgctgcagtgaaccatgatcatgccactgcactctagcctgggctacagagcaaaactctgtctcagagtaagaaaagctaccacatgaataaaagatctcagtgtcaccaaagtccactcctgccagcatcccttccccgctgccctgagtttaaaaagagcaatacttcccaaacctgtctctgatcaaaggaatccccaagggcttcctgagaacaaccacaaaatgactgattcccagactttccagaactgaatgtctaggataaggctcaggatctaaattattaacaaatactcccaggtgaatgggcttgattggccaaatttgggagaataatggaatactgaagaaagcaggtgagagggctgcctgtgtacagtgttgtcattgagttgatgatagcttgttggaaaatacctgtctttctggaaagtatatatagtgacacccacaccctcatctaacaaacagtgcagcccaggataagcacgatcatatgtgcaaagtgctccacgattagtgaaagaagatacaaggtgatattattatctgtgctgacttcgtcatcctgggcatcagcgtcagggtcatcatctgttatctctcaaaatacatacaagattttaagtagagcagcttgctcgtctctgagaagaaaatcaagtatcacatctacctttgtggatgtgggagggagggaatttgggaaatgtttagtaattgcattctttttgtcttcttggacacagtaccaagtctccttaaactaataaaagaaaaaaaaaaataaaagaaccacacaaactgcattcttcagtcactccctttctccacaaagtgcttcccacccatttcagccttaaaaaatattctaggcatactcagaaatacagtgactgtggtggggcaaaatgttgaaaattcctttgaggctcatttcccaaattttactagttggatgttacactgaattatttaactctaaataaatagggagtgcactcacagcgtcgtttcttttgttatatcaaaaagcctctctcaaaaaatgctttaaaaatcagttggatatattattaatactaatattaataaaagttaacatttactgacatttgaaatgtaccaaacactctagatgagtaatctttttaaaccttatgatatccaaagaggtagacaccgttgctattcctgcttcatagatgcaaaactgggctagacaagttgaataatttgattaagatacataggtagaaaattacaaagtacggattgactcagagggagaatgtcaagtcctctcctaaaatgtactggcatgtacacacatacacaagctgctggatgtgctggtcctcaaaagttattccctagggacatctctcttcttttttttctctctccttccctccctctctctctctctttctttttcttttttcttttgagaacagaaaacaaatctataccatctattcctgaatgtatatgagtggagggtaggacaagaggagggataagatctgtggatgcacagaaactctttgggaaaccctaaaaactctctatagttatataagctaaggaaaggattcctgccagggggtataggattcttcaattcccacacttctcttcctgactcttctgaagtgcccgttgtcaccagagtgcccaggggcagagcattgacaaggaaaggcccaggtgtgtgtgagaagtcaggcagatggggtgtttcggaggaaccagggtaacgcagtgcttcagcgttagcactcaccttgcttctgggaccacttaccacgaaggcctgaaagggcaggccccaactactgggaatattaatcttctctttgggtgaagtctcttcatgccattatcatctcttagctaccattgctaggcaaaagtttcctagctcaccatgtcctgaatgcacttccttgagatatttctgatgcttaaatatccagtgctttctagtgtgccgtcttccttctgtatttttgttttgttttgttttgtttttttgtggttccttttcagcactgttggtcctgtggaagtatttctaattgactgtattctatatgccacacaaaacagatgggtgtttatgacattcttttctggatatgtttctgatgtttgcatattgaacacagaactgtccacatagagaacttgatttctgcctcttcctggctttgcttttactcatttagtccctagtatgtgaaaggctatgcttaggctccaaggacccaaggatgaataaaatacctccagtaagcttcaggaccattactctagaggtttgtggaacttaaaaagctaaaatgtgttctgttgaatgacaaaaagcattaagttaatagaaaacagagggcttataagtgaatggataaatgaataagtaaaataaagaagagagaaaggaagggagagaggaagaatggagcagatgcaggtgagattgtttttctaaagagctaagaagctgcctacagtgttagcttagagactgaaaatggtttgggaaaataattcagaaatttagggaatacttcacagcatgagaaagtggagggctgagattggtaaaagaagacatgtttcaaaatagccaaaaggaaaatagaaaagaactggtcgtgaaaccgagacctcagagttgaatgacaagtaagatacctctgaagtcactgacagtggactgactgttatttgactaatattgcttctacagagacagacctaggttttatcctcccatagaaaaaaatctcaaacattggtaggttttgtttttgtgttttgacatacaagtcaaaatctatgtgaaggaggaggaacaagactcaggggtcagaaaattggggtttcgtggctggctgtcctgctcacccactttacgtgtgaccttagaaaagtcacgccgatgtgttagatcttttctgttaaaatgtggtgggtaataattataccttcctaattttgaggaattacatgagataatctgtgtaaaaaaattagcacggtgtctgggacatagtaaatgtcaggtcttatttaaaagcatgtggaaagtgcttaatatgttgaaaagtattataaactaccaataaatattattatattattcaattactgttgatcctcaaaacagccatctctggaaactgtgcaattatttgagccctgatgccattgctgaaagcattttggaagtggctttagagaccatttacagaccatataagacacacacataccaaaaagcaataagcaatctcactggtttatagtaacacttcacttatgaccaaaaatattatttccaatatgattaccaaccctattcaccagacagaatgtcaaattagcttagatggggctaactccagaaatgaaaccattctcaagggattttaaagagttttttaagaagtatcacatggacttttaaggcaattccaagacagggagccctaaaatcattacaatgatggcaatgtgtggaataagcatataaacacattttcccagatgcaactttgaaggagacaaaatctgaattctaggcagtttgtgaaggaaaaggagcaatttctgggaaatttcttttacccctcagccaacctcaagacagtctgtctttctacagaccctcccttgctgtttctctttactggaaactgttgagggtactggaaataaaggagaaggccaatgtatctaagaccagtggatcagagaggagcccaagaaccttcatcatttccacagaaagggcagcagaggaaattaacctggccttttgtcatgctattatttctcagtgagtctattaaattattgtggcacactaaacagtgttgtctgcatcttgttctttggggattccatacaattctccccttggctggcttatcacctccccttagaaaatggtgtctcagcaatgatcctttgcttgcaatacaaaaaaaccaactctgctcattaatgcaaaattcttagtggaagaatataggaagaattctgaattccctgagaattagtggggcgacaggtggtggtgggggtgctggaggacgaggtttgaaggaatcagtgcatctttacagtgctagaaggctacaaatcaaggggaaagtctcatggcaggagtagtcgagtgagatccccacaactgttcttagtttctttgtcattatttcaagagtcaaacagcagtgaagggatctaatttgtcttgtttgcgtcctgggccttggctaaaagagaacaggcaggtggcttcagttctaccaaactatgttataaaatgtggtagtaagagctgaatgatgggaccagattttgtgggttcatattctagcactacgacttacagatgcttgtgctcaaacaattcatttaaccttccagagcctgaaattcctcacttttgaagtaagcacaataataatatttatctcatagggagttcatgaaaattatttgaggagatatttatgaaaggctgggcatggttgctcacgcctgtaattccagcattttgggaggctgaggcgggcagatcacctgaggtcaggagtttgagaccagcctggccaacatggtgaaaccctgtctctactaaaaacacaaaaaaattagccagacatggtgttgcacacctgtaatcccagctccttgggaggctgaggtaggagaatcacttgaacctgggaggcagaggttgcagtaagctgagatcgtgccactgcactccagcctggataacagaggaagactctgtcttaggaaaaaaaaagatatttatgaaaaatgaagcaaaatgcatggctcacagtaagcacttgatcattgctggttaactattattaagattatctaatagggatacaaagtatattcctgaaagaaattagggtgctcttagataggggagataaatgctagtaggattggtttcaatgcactatttattttattaatttatttctcactgaatttctttttatgatactcattttttttagagatccagatggtacctgtcattaatgtatccctgagaactcagttcctctgaaggcacaaaaataatttgaccatctcatcatttgatccacacacatttattgatgcctcttttatgcttggttctatacaagacgccgtgacgtgtggcccctgtaggaagtcctggcctctgtctctaaatctgtcatctcagcccaacccctattcagattatctgtgccctctgcgtagccattcacttcgcctgggtgcaatcatgccttccttacccaacatttaacaagtccagcctagcaacctacatcatgccatccaacagaaggaaggcattattgactcagaacaaagtataggcgctcttagaataagtttattaaatcatttttttaaaaaaaagatatgtgctttttcccaggggagcagtgaggcattgtcagagggtggattcattaaatcaatacagagaatcctggctgcactatttgttagctatttgactttgggaaagttattctctgagccttgatttctcattagaagacgggaataatagcaaacctatctcagagcattaagtaagaattaaatgaagtgaattaagcacgaaacctagcatctgacgcatagtaggaactaaaaaagaaatactagttcttgaataaacatttttttcttgactgtactgtgatacttccatcagtgagtttccaaggcaaatgaatcatctttagaattggaagctcaatgtaagcaacaatgaagtaaagaaaacaactgaatttctcttgaaattattttcctttactgacttgtctttattgtctgtgttcacaagaaactagctctgactgcaaaaatgtctgcctgtttctatggccagttcttttctacatgtttaaattcctaattgtgcacacaatcttagtcacaatattttcatgtgcaagcaattaagactcatttaacagccctccctctggaaggttttgttctccatctgccacaaatcagattccttaggaagatatttgattttgaaacaatgttaaagtactgttcattttgttcaaatttcatttatgtaccattttttaaagtgatgtaaatggacagccacaaaaagctcagcagctggtcaaaacaaaacatcaaagtcaccattgaaatggggcaaaaaaattaaaaactaatatgctgggacaatgccaaataaaaacgatagtctgataaacattcctcagacacattttgctcataacaactatttcctttacagcagatttaaaatatgggaaaataggaatataccccagttgccactctgaatcttagctgtcctgagttcactgcaatgtatataataaggaagtcagaaggtggaaaagaggaaaagattaaatttgtaagttttttgaaagatatatggtaaaaagtagaggtatccaacagatttgtacgatagattgttcatttaaggaccaggagcggtggctcacgcctgttatccagcattttgggaggccaaggaggggcggatcacctgaggtcaggagttcgagaccagcctggccaacatggagaaaccccgtctctattaaaaatacaaaattagccaggcgtggtggcacatgcctgtaatcccggctactcgggagactgaggcaggagaatcgcttgaacctgggaggcagaggttgtggtgagctgagatcgcgccattgcacttcagcctaggcaaaaagtgaaactgtctcaaaaaaaaaaaaaaaaagattgttcatttaaaaatcaattcgattggccaggcacggtggctcacacctgtaatcccacagcactttgggtggccgaggcaggcggatcgattgaggccaggagttcaagatcagcctgggcaacatggtgaaacccccgtctctactgaaaaaaaaaaaaaaaagtagccaggcatggaggcatggtggcacatgcctgtaatcccagctacttgggaagctgaggcacgaaaatggcttgaacccgggaggcagaggtgagatcatgccactgtactccaacctgggtgacagagcaagactctgcctcgaagaaaaaaaaaaaatcaattagataagtgagagtgtatattcagggcaacttaaatctatgctctcagattaaaaataagatttaattacaattttttttttttttgatgcagggtctcactttttgctcaggctagattgcggtggcacaatcacagctcactgcagcctcgacctcctgggctcaagcaatcctcccacctcatcctcctgtctacctgggactacaggcacatagcactgcaccaccatacctggctaatttttaatttttttttttttttttagagacaggatctcacgatgttgcccaggctagtcttgcactcctgggctcaagtgattctcctgccttggcctcccaaagtgctgggattacaggtgtgggccatcacacccagccaattttgaagtatttaatttttaaaatgaaaaattgattagataatagttctccctcactacaggtgaagtctgtttttatttatttgttcaatgggcttctttagaacatgacatagaaggcaatccttggtcaaattaaggcagaaacaagaatttattaggttctgaacataaataactgtctgtgaactggtaactctctaattaagcataaatgtgaaaagaagaggattagctcttcttgaggagttggaaatggaaaatattacaatttggagaggtagcttgcagaaaccgtacagttttctctgcttatatgccccagcgttgggagacttgaaaggaatcaccaaccaagttaatgcaataaatttccatatatagatcaattggatgttttgtccccagcttcctaggcctttaataaactgaattgttttggtatcactggatgaaaggttctgtaaaagttcaaagtattgttatttggggcattcacacctgcatgtttaaaatgcctttgtgcagaatgtagtccaatctgctttcaaatcagaccttcaaagaagggtagattcatccatgtgacagatccccttaggtgcttctctaaaagaaaaagttaagctagcaggtctacccccactcattatctttgtctctttgtgcgtaatcatcaaaccgcacctctgaaaagaagaccaagagaaaactttagtatctctttgctggagatgcaaagcaagatatagaaggaactggaaaatagttcttaagtaaatacagggggaaaacggaaattgagaggacgtacttttcgctaacagttgtaaactaaaaataaaatttgaagcacgcctgcaccctcacctgaatggacttcctccttggccagggcactttaaaatttaacctgaaagactgatttaggccgcaaaggaagtcagacatgccttattttacccctccagtattaacatcaccacagaccttaagtctgataagaaacatttaggatctcttttcttggaagcctgctacctggaggcttcatctgcctaataaacctttggtctccacaacttttatcttaacccagacattcctttctactgataataactctttcaaccaattgctaatcagaatatgttgaaatctacctgtgacctcgaagccctcccccaactttgagttttcccgctttccagctttccagatagaaccagtgtaaatcttacatgtattgattgatgtattatttcttcctaaaatgtacaaaaacaagctgtagcctgaccaccttgggcacatgtcttcaggaccacctgaggcagtgtcacacgtgcatccttaactttggcaaaatacactttctaaactgattgagacctgtctcagatattttgggctaacacaatgaatatgaaaaaacttttttgttggcgggggtgggaggtgggacggagtctctctctgttgcccaggctggagtgcaatggcgcaattcggctcactgcaacctccacctcctggattcaagtgattctcctgcctcagcctcctgagtagctgggattacaggcacacgtcaccatgcctggctaatttttgcatttttagtagagacagggtttcaccatgttggtcaggctggtcttgaactcctgacctcatgatccacccatctcggcctcccaaagtgctgggattacaggcgtgagccaccacacccggccaaaaacaactatttttaaagagcatctaagctcagaaatcacaggcatattacgcctgccactaagggagttagttccattgaaggatataattaagagtgaaatgaatggtgtgctaagcacttagggatagtggttcacaaatttgtctgttccttaaaatcaccttggggggcaggcgtggtgcctcacacctgtaatcccagcactttagcaggtcaaggccagaggatcacttgaggccaagagttccagactagcctgggcagcgcagtgagatcctgtttctacagaagataataataatcacctggaaatttcttttttttaatgcagctaatgaaggaaaaaaaaatccgaggttttgaaaccaactcaaagacaacagcgatattcaagcataagatgtaataaaggttgtacactagatagctagatagccagaataaaaaggaagagatagttacaaaaaatataaggaggataaatgtataggatttcataactgctaatcatatgattttactgagtaggtgtaaaatgcttctgataatgtgtgaaaatttataatccttcgtattatatgtaggataaacataggttaagacctggattctaaggctgaatttaaggctagtttatctccatccttagatttcctacatttcatttaagagaaaatgtcctgtatattgaatattcatgaaaatctctgaaaggtgttatgcttattcttaacctcttaaaggtgtacactgaatgtaattaaatcatttttgctggctctggttcctcatgaacatctgcttttgtacttccctgtcattcacaaatgcacttaggagctaatgatctatgaggacttttttttcccctacagtaacgagcagcaaatctggctgcactttaatttctcatctgctgtcccatattgtctggtggtcagttcatgatgttactaagcttggctttattggcatcttttgtgagctgctgctgctttttccttggcaaacctgattaccaagctattgcattgagcataaaataaaggtaaattaattcaaaataaaagtgaaggttgagggcaattcatttctgaggtagacctttaggatatgagatgcataaagtgaacaagatcctacaagtgtttacttgacttttctgggttcttttcacctacttactgattttgaatagtataaattcctggataattaatctggataagtaagtcgtcactgtacctctagagaaaataaaatcaaccaaaatatgtttaattctgtgctctgggtttcaagaaaacaaaaatgaataagatatagtcctacccccaaggacttgacacaatataattgtacatgtgcaaaagaaactgtctaggtgtggtggctcacacctctaatcgcagcactttgggaggctgaggcaggaggatcacttgagcctaggaatttcagaccagcctgggcaacatgatgaaaccttttctctacaaaaaaaaaatacaaaaattagccaggcatggtggcacatgcctgtagtcctagctactgggggagttgagataggagggttgcttgagcccaagaggtctaggctgcaatgagctatgatcacagcactccagcctgggcaaaaaatcttaagtagtctcaggactgtaccacagagtatcgtaagaattcagaggaggcaaagaccaaattagaataataagcaatgaaggcttccagcaaacatggtatttttgttgggccttgaacactctttagatgctttagtttaatgtgccatagtcacactttctgtattgggagtgttaatgggtgataactactccagagctttaggattgcttccagtatcccagcaaagcagcccttttcaactagaaccgtttgctattacaaaagagaggtgatcacttgtgatttcttaacatttcttcactttgcctctggcactgggcttctgaaagtccaggaaagagcaatgacctcagggttttaagaccaggggtataatcccagctctgcctagctctctgtgtaatttttggtcagtaatttaacctgggttgtgttctgtaaaatgatgatattggattaaatagtacctaatcatctaactttttcctaatattttattattataaaaaaatgcatgcctctgatgaattgcctttatcttctttagtcatatttccctaagaagtgaataaaagataccaaggcaatgtgtgaattccactttttccaatctggatgtttaggggatatccttgacaccatttgctattttgagttttcaacaaagagttaaaagaaaattctggcactcctatctagtcatcctctccagttggcagaagtcttcatgtggacttgatggttgcccagagcaacaaaatattagggacagaaacatgttcagggactcgattgtataagtgactcagagctgagagaccttttccagcttgactgcagcccatacttagctagagtgggtatttgtctattcctgtctgcatactgtgacttggagatgcctattattttgcttgctaaaatatggaagccaaccttgaaactggcagagaagagttaaatgatcagaaggcaatcgtcttcattcagcacgtctgacacatgaaagatcattaggactagcaaatataaacaagatcagggagtggtcttgggctttgaagagcacataccaagaacatcaagagaactcaatataaattcaatataaaagctactattcaaggccaattatctcttttgagttagaagagcccaatggggagccactcacgcaaatcaataccctttccttctctcagttggagccagacatctctaactatcctctgaattaaactggatttttaaaatgtttttctgtccctaaactctttaaatcctgaggtcatcctttctttgttccatcagtctggctccatgataccaattactccagcttgttaaagcagttattggcatatggtagtcatgtcttttgtttctatgcaatgtttcctggagcaagaattggagggagaagtattagccaagtcttgttgctttaagtctcctctcttcaactgtttaactaggttccatcctaattatgtgtttggttggttttattttgatacccaatatacattcttctcatttgtacatgaacaatgtcattatggtaataataacaattatacaatattactttctgtcctcattgaatgtcattatgatcaggagctggtcctcttggtttggacattataatttgaaatgaatattctttttaaatgattggaaacttagtcgtaaattcaagtggtttacaatagtaactcttatcccagtaaccacagcacctgtttagaaaaatgtcttcggatcacttgtttgcaaatgtctttttccttaggatcctggatggaattgaacccatatacgttacttgacatgtgaaacacgtgtgaccctggcagatgatttggctgaccttgaaaactacagctgtttagtcactttgaaaacaatgcaatacaagtgatttactaggcttcagttttaaccattttatgctgactggtggaaattctaacccttcagaaagaaaaaaaaattgtgaagcaatggaaatgtaccatcctgggtattaatgtcattaattttcaatacattttctcacaaaaagtataaagaagtctttgcttgaccttacgggaaaaaacaacatacatgtggctttattttgccttttttttttttttaattaatgaagaaatccaagatttgacttttgtttcttctctacccaaatcaaaagcagtctataatctcctgcaaagatcaaagctttttgcttactataaagtatgtgccctgcttaggcattacatggtagaaagatagcattctgttccaagaaatctctattcgttctctagttgctgtgtatatattctcttttagctagaatatggttagtaaatgagtcctgaaaatttcgctgtatataccaaaacatgttgtataccataaatatataaaatatttttatttcaattttttaaaattgtgcttcaatcaagacagaagttgatttctttttccagaaattcagagtgagcagtccagggctgctgtggctgctctaaaatcaccaagggcccagagcttctttcagataatttttttaacatttctagattataggctttgtcttcatggtctgagatgactacaagagccctagccatcacaactaagtggccagcagcaagaaggaggaaaaaagaaggaatagtacacccactccttttagaaaaggcttctgagaaatcccacataatgcttctacttacatctccttggctcaaatttagtgtctgccacaaaagagaataagacacacacacacacacacacacacacacacacacaaaaatatatattttttttttttttttctggcaagtctctagttcagggatttcaatctcctttaagcaaatgagtcttctcctaacctctccctctggcctgcccagtctctctcgaatctcttgccatcctgtcctccttactcactttgggaaaatccagctctgtcagttttacagtctgccttttccacttccttacctgaattcctgggaaaaataatcccacatcacttcaagctggaattccaacaaagtcaagacctgtcacctcatcggactctcagagcacttgacagttagttcctgctgtgcccctctctcagtcctcttcatgctaattccaaacctgtcctctctcttaagcctcccaaaccagcagctcttcatctcctttcagcaaataacttgttgctttttgaagaaagtctgtgtcaaggcatgaacttcctcagctcctacatcctcttgccatagatgttatccataggtctcttactgacatccataatcccttcctcccttctggtctcagcggatgacgtttcccttctccctcctgctctaagtcaacccctgcatctgggcccttgatcctctctcctcccagctcccacaagtccttgcttcgtctgttttcctttctatctctcacatcttcaatctttacttttattctggctctttccccattcatgtctctcacaatcttaaaaacaatacacagcaaaccacagcaaagttcagccaactctttattgatcctttagctagttcttgatcttctcttttcagtcaagttgctctacctcctcatccctattcagtctgcagtccactgtagtacgactttctcacaacacctctgttccagctgccctcccttggttgccaatgaactcctaattgtcttcttagttcttagaggcttcttcttcttaaactctttctttgttcatttactgagtaaatatttattcaacatgtttttgttgggagccattttgttccagatgtttccacactcttcttgctgctctgaatacttcttttcactattcttcatggtctctcttcctccccactttacctcttaaatgtgagtattctagaatgttctttttgattaattggttttctcactctgtgtactctgtagatgttttcatgtacctcatagttgtattttccatcttatgaaagtgggtcccaaaactctgtctctactcagagtaggcacttccccaatttccaaatttattcacacaaaagcccaatgtccattgatatccaactcttcaaatccaatatgtccagagctggactcacatatttctttgcaaatctgttcttcctatctcagttagtgaaacacttttagccaagatcgaaacttataaatcatgaatccttctaccaaatctatctgtctgtctatatatatttttgaaacagagttgtctcactctgttgcccaggatggagtgcagtggcaagatttaagctcactgtaacctccacctcctgggttcaagcaattcttgtgcctcagcctcccaagtagctggtattacaggtgtacaccatcacacccagctaatttttgtatttttagtagagacagcgtttcactatgttggccaggctggtctcgaattcttggcctcaagtgatcctcctgccttggcctccaaagtgctgaggttacaggtgtgagccaccatgctcggccccaaatgaatacaatttttattttattttataactattgatcaaatccatgctctcttctctaacctgctaatatttccctagttcaagcactcaccaactctcccctgaattatagtactagtacctgaaatagtgtttttgaaactgtcagttgcatttagcattttattttaaaaatatgatacagaattgcgtaaaaaataagagtataaaaccacatctataatatcaaagataaatatggttttataaaattattgatacacccacagacatgcaaacacacacagacattttgccatgaaaatgtatttcttactataatttttaaaattagagaactactttcttaaatggtcgatctctgttgcacctcttcttagctctggccttccatgatgccagcaaatttatgtagttgaaaaattaatctgcaaatgtcactcttcttaaaaccttttcaagccttcccatcatccatgataaaatcagatctctttcgtgtggtacccaaagcccctatccagatatgtattgtacctcctctccagcccagcccctggctgactctttcagcagcaaactttttccacccacgtgcaccatgtttcacaactgtcttcatttacttgtactcttctcaccatctaaaactcgcttctctctcataattgcctggttcactttatctcattttagaggacacctaaaattcaagcccagtccccttcctcaggccgagtcaggctcttctcccaaacctacctctagcataacctaatgaaattgctctaaaaattatggtctatgcctctttattaaaaaaaaacaacaacaacaaaaaaaaaaaccctgcccaccagtatagcaattcttttgttataaccacacatagtactagtgtgtggttctggggcactgtcatgccaacttacctgtgttcaatagacctgaagtagggaagatcagctgactcttttacatctcttctcagaacatcttgaaatgattcttgggtgcaatataagagcaaaacatggaacagtagaaaccagcatggaaaactttttctcctatttgagaaagtgggatgaaaatgtgtctcttaatccctttggcagaagggagtaacttgaaagaagtggatgatggatgatcttctccactctgtcagccctctgagcagaatgaggaaaatgtgagaagcgataccattgctatatttgtttcattgaccattattttaaataacttacatggtcctgaacaaggacatgtttttgtgaaaaggacaacatttcttttggtgtgtccgagtagcatttaagaaaagccttatagtggtcaatgaaggttggcctttcacccgctgctactggagagtctgtgagaacactatttattcagcctcatggaaacactagggagtcatgcctgggatctgacaactgtgcagcaccatgccaggtgcacagagagttgttgtgatgaatgtcgagagaggtggtgggggatttttgttgtttttgctccttccattttctttccctctgacttgggctgtggtttcattcattctacctccccacccctatgcaagaatagatctctgatctctttctcatactttatctgccctaacttccactttccttttcttgagaggagaagaacaactccacagtgctttccttttatgttttgggctaattttgttgtgttgttttatggtcttgaactgagagctgcctcagcactcaacaccagcccctggactgtgagactaatgagaaaagcaaaatgacttcaagtaaaaggaagtggtttgtgttgtggagagaaacttggaaagaaacaccaccaagaacactaggggctttattttccctaaagcctacagttgggttaacacatttcaaaataaccggtcaatttagttaatcccatcaaacgacctagtcaatacagtaaagaggtagggcaaataaacaaaccgttttttggatgaccggtttagcttcatgtatccttcgtcttactcatttctagggaataatttcaactcaaggaaatgtgaacatctgttttgcaaactattacaggctggtttaatacaaaaatacctttaaaaaaggtatgttcatactcaacatgtttttccagctgttattaaagcaggtagaaacaatatagtaggcatagaaatcttgattataatgtggaaaaactaaggttaaaattattagcagaaatacatttcttttccatccttccactgtctgaacatctctctttcctacttcctccattttattattttctttgctttgtttctctcttttaacctcaataataacaattctgtgtgccaaacactgtgctaagactgggcatgcatgatcacataaggtaggtaaaattattattcccattttacagaagaagaaactgaggctcagagaatttagggatatgtcccatggtcattattctggaaagctgtggagccaggcttcaaaacttggcagttatatttcagattccacaccctgcagtcaacactctgctgcctccctcaaattttatctcagttcatttgttttctccgatcttctccttttcacatgttctctactctattctcttgcctttttcctttccttatatctgcctcttctttttccagtctcttccctcactccttcccttatttgtcttgtttcccattctttgtctaaatctcctcttttctctccctcttcaccctattcattcccagctccctaaaattatatcattcttccttcatcatgctccctcattcctcactgcagcatcacccagtccaactctgtcccatctgtgattcctcacttctgctttcgcaccatctctctccctaaggtagaagtggtgcccagctttaaacacaaggcaaagtgagggtatgttccactaggacagcgtgtgtcactctgctgccatacacagggagtaccatcagtgattataaagaggaatttcattcctgccagagagctcacaaattaggttattgttgatgttcatatagtttttagtgactggaaaaagataatgcctccttctatggtcactaccaggaagtgagctccatgcagcagacagaaaccaaccagataactgtgagatcccagccaagcacaatttctacatgttagtcaattgcaagaaacactgagatgtaatgtagtactttggactcatattactcaggtgactatgttttcaagcagccagtacaggacagaagagattcatttccttgaatcaaagctatttggtgacttttcctggaaacactctgaggcttacaggaagggattccagattcccaagctactggcacagagtaagcatcttttctttacatagtaattcacaaacgtccctcatcaccatatgacaatatcctcactggatcagctcggttaccagaaataactagatcaaaataaatgtcattctcacatggacacaggtggactagggtttagaagttttgggaaccatcacagttctaggcacctgaaacttcttcttttgcttgtagtaaatatggtgtctttctcaggactctgccctttgtttatttatatatctggtctggtttttgttttctagagatagttctctactctccatagtgtctgctttctcattgcctgagtttgtacatggcttgccatagcttctctaggcccaattttaggccatcagtagatttaaaaatttttttttctcttgacaccaattaccttagttgcaatttcccatttataattgcaacttgagcctacaaatttacaaatacaatgaggtaactttccactgtggttaaatattatagattattggctgctggtaaacccatgaattgcctgcctttggattagatattcagaccaggtccatttaacaattcagacatttttttaaacaatacttttttgagagtcttccatgtgccaggccctaatcaaagctcttgagatacattgatgaccaaaaagaagcattatccccattcttactccttataatctagggtccaggacaggggagatatgcactgtattaatgaaataatctgtactgaatgtaaaattccaaactgaagcattttatatgaaggaaacattctataagaatggaagcccagaagtccagtctacacatgctcctggaattttatgggaaaataaaaagtctgtcagaatggatcttttgagaagattccagaagtatgttggccaataagagaaaatgagcaagtggatgccagaagccatttcttccattgttgtgctcagtttgcagtgatactactgcagagcttgaaaggcaagtactggcttctcttcctcttgttcttccacccagaaaaaccatccttatcctcatattcctcctccaccttcaccaccactactacctattttgaggctgccaccaccacactataacatattcctccccgctctaaggctctgaatttggacctcccacatgacaggactctaaataatgactaatccattaagtttctgctccatttccaaaatattcattcaaatttgaaatgcctggggcctcttgtgtagccatggctgggctaatttctgcatttgcattttaaacaccctgaatcaggattacacctgaagactttcaaataagtgcttagatggcacaataaagatattcaggttaaaaaaaaatctaatgagtctgttgttcctttgcaaggcctagtgataggaacctcttcttggaaatatttgttaagccattctcacttgtagtcactcttggtaccaaatctgttgaccgaaaaaaaaaaaaaaaaaaaaaaaactcgaggagagagggagaaaggcaaagttactctaatgttttaactaacccatataaccacggagaaccagccctaggaaccaacactaaaatcttaaggactgttttttcagactctgaaaattctcctaaatctccattccagtatcattcaagctctttacaaccgctgtttgtccttaggctgtaacttgtgcctgaaatcccactctaaggttcccttgtggtatttttaatagtgtttgatgctgcagccagcttctctgcggtttgggagttaaatgggatacagcaatgtggtgtgctgtaatggctcttggagaaatgttagggcaaattaaattccaaataggatagcacctgaaagaacctggtcctttagtgaaagagcgtaggaaggaaggcttagagagtcttactggctcctaagtgattaagaagaaacatctaacctgagtttgaaattcattttggactcaaatacagagtatttactttaagacactggtccttaaccacctggttcttccctgtttgcttttctgcttagttaagcccaaagatgggtgttagtttaagagaaaatggtactaaaagggaggaggggaataattaacacctttgcttaaagcaccaaatcccatgagctgatgattgcctaggttaggcaatgactactaccactactaccaaacaggtctggcatctcctattcctatcctgacacccaggcccaagctgagcacaagcattgcaggattccgcagcctaatgtccgtcagcttttcctttgaacagtggttacatatcgttagtgtatttgagtcaaatgtgggtttaaggtagtggaaagacttttttctgctattgagaacagaatcaattttttaaaatgtgtatgtacacacacagatacacacacacacacacacacacacacacacacacacaccgctatatattttattttggaaaacagttttatttccagtagatctttattgaataacctatcatctacggagttcctatttaaaagttttcattggtaatggatttattccagacaggacaggttatatgtaaaatacaattcgtaaccaattaaaacaataacaaataacttgtgctgagtggttaccatgcaggtgctgggatacgctttctctctacatcatcatttcaccctctccacactgtttgaggtgtggatctattgtcattgtctccatgctataaatgagatgaggcacagatgttttttattatctccatgaaacaaatgagagcactgaagcttagagaaggagagaaacaacaacttgaaggtttagatactgtttgaggagttatagtaaaaagaaaaatgaaaagtcctctcaagttccactgaaaatcttataagtgtgtttctttcccacttttgcaatataatttttctcttctaccctcaactgaaataaggtcacacagcctatacagtatagaaccaggactccaaggtcactgacaacaaagtaaaagtcagcagttttggaaaatacatattttttttttcctagctgaggatgggttaccttcattagtgacataactatgtcacttgaatatcaattattggcttgaatatcaattcatttctctattaagaaaaagaggaaataactcagatataaatgatggaagtggctactgagttaggaaaacatttgaaaatcactttataccaagaaatcacattctggcaggcctaatatggtataggagatattcgtaactggttatcttcattgaaagattatagagactagagaataggaaggttaagtaaaaactctacaaatgataaaattttatgttaacaagtaacctaaccaaatactgtatttcgctggactttattgtagacaaacagaaattctggcaaaagaaaaacaacaaaaaataggaaatacagttactaagttaaagctcttgcatttacattataagtatttctaaatccagtttaagattgtggaaacaacaacagaagtatatgaaattctaaatgccatttaattaaagtgttgaaagagtagagatttcaacagtatcaaaacttgtgatcttcaaggatcaaagtaaaggtgagtttatagaatgctcactctaggttctgatttggccaattcaatcacaccactgcccaattcaatgaaaaatataggcaactttgtcaagcaatgaattttatcaatgtattcaaagttgaatgcatcttaggaataatttgagggtttagaaaatgtttgaggttttttttaaaaaaaatcttccaatttaactgaaaactcttgtatttcctttctacttttcaaatatagcctttgtcctttaccctccattgtagcttaagatgtggtcttgcattataaggaatatttaaaaccattcaatattttaaaccaaagacattcaatttttaaaatttaaatggaactgccatgtattcttgagtgttgtagctatacagcagtggtccccaacctttttggcaccagggactggcttcatggaagacaatttttccatggatggtggggagaggggttggttttgggatgaaaccacctcagatcatcaggcattagattctcataaggagtgcacaacctagatgcctcgcatgcacagttcacaataggattcacagtcccactgatctgacaggagataaagctcaggtggtaatgctcgcttgcctgctgctcacttcctgctgtgccaccaggttcctaacaggccatggaccggaagcagtctgtggcttggaggttggggatccctgctatatgggccagaaatgtgaaagaggtgttcagtggggagtatacttctaacttgaatacattcttttcagcatttctacttattttatcaaaaggtaattttttttctcaggaaataaagcaataggcaattgttttttatagtttttctgtacagagccttattcaattatactaccaatgtaatcctattgcactgctcaacagaatcagaataagaagaacttccaagtacaatttgaaaataaaagtatctttcaagaatttgcactgtactgcattatttgatttggaaaaaaaaaaaaatcagaccacttccatttcttgatgaaacaactaactcatttgctaactttcaactggctctcttcagtggctttgagaatgtggcacttccatcataccttgcctgtagtaccaccctagaactttttttaattgaaaatattttaaaagataattgattcgtatgcttcaaaattcaaaacgtgccctagaaaggatcgattattaacagcttcttgtgtattatgtaaacaaatcttatgcatatacaagcaaaatacatattggctagcactcttaaaaacataggaagggttgaatctgaccaagttaatatttcaaaggtgtctatcagaaaggaaaaggaaagcttcctacagttatgtgtatatttttttttagtttaaaaagaataagaacaagatattgggtgtgtatgtatatatgtatctatttatttattggagacggaatcttgctctgtcacccaggctggagtgcagtggcaggatctcagctcactgcaacctccacctcccaggttcaagcgattctcctgccttagcctcccgagtagctgggactacaggcgtatgtcatcacgcccagctaatttttgtatttttagtagggacagggtttcaccatgttggccaggctggtttcaaactcctgaactcgggtgatccacccacctcagcctcacaaagtgctgggattacaggcatgagccactgcgcccagccagattttgggtttttaaacctattgaacttatctttggatacatattttaagttttccttaactgtaaatgtgtttatgttcactagaaacaccacatgatttcgcagacatggaattatgtaggtgaaatcagcggctttcaattagggctcgataatattagatatagtataacttttatggcattcacacatactcttcagggataccctttgcaattccggaatagtgtttttcttgcttacttcagtcgatttcttatatctttaggaaagatctgcacattcattctaggtgaatgtaaaattgcattttaaatccattcattgggaatctcacttcttaaaaatcatgcggaaagatagatgtacatttttagtaaccgagctgttcagtaaatttcttaagattattttctcataacctctgtacatcaaaagtgaaaagaacctgtccccttctctctgtatgcaaaattccagagaagcaccaagaaccagaagaagatgaaagattcggaagagcacacattttccagcctgccagcctgggtttaatttcactttcccaaatatttacttggtaaattcagaaaaatcactggacctccaggaacctcatttccattactgtcatgtgggatagtgataacactatggatcattacaaatattaaattagactgtatggagaatgctccaaaagctaaattattgagtgctcacaaaaagcattcaacaaatacacctttccagttgaaaatgatcattccattaaattcaccctttattttctttgagaaaaaaaatctatgttctgcattttcaaacttacttttcatggatacatagtctgtaataaaaacagcatattaaacatacctttaaaagaacaaagacatttataaaacaataacaacaatcagcttctggatggttcccccccccccccccattaaaccctattaaagggaatacggtctctaaaagggaaatccagagacctgtgtattcgagttataaccctgggtcaagcaacttaactaggctgatattttggcttgatgtgatttatatgtaaccttttaagcaatgtatattaaatccgtactttttactcatctacttgattgcaagctcctgcaagataaactttgttgaactcaaatgttgtaaacttcatggggcttagatataaactacagacttcatcagtgtttaacaaatacttgcttaagaaacacaaagtcctgttatatcagccaattaactatgaagctaattttaataactgaaatatcatagaggttaatattcaaaacaccactcatcttttttctcattgagtattatttatttatttttgctttctggagacatacgtttaccctttatttactgtctcattttgtcatctctgaacataccatttacagctttttagttattctggaaaaatcactttgtatgaaataataggctatgatggctagaaaggatctcactgatcatcagtgcaaggattgattttagaaacaaggaaagtgaaaccagagacagccagtgactagtctcagtactcagagaggtcatggttggtcagaggtcagaactcacatctcctgacccacagcacgtttggctttgtgcacaactgactgccttagttaaggacagataattcttttctctttaacaatagaaaattagactaattaaagtcataaaagatgttgctcctttataagccatagagaaacccccgatggtttctttatttggatctgtgatctttaaagcatgtgactagcagctataattggattaaagtgaaaacatgtgattgtgaaggagttaaagtacctttgccttattctgctttgatagccagcttcaattgcacatcgtgacaagcagtgaaccaacatcaaccctgtggaattaaaactttagactctatcacaagcttttccaagttcaaagcccaccaatttattattggttccaagttctaggtctagaatcaagtcagctgggacatcaaatacttgttacaaaatgacatttgaatgagataattataaatagcactagaagcacatgaattaaatattgcctgaacactaattttcttaggtaggatattgggatgtcctttgctttatcactttgcagtgatgtgagcagtatgagatactatgttttgcaaaactgtattaattataatatttattgagtacttactatgtcccatgcacagtccaagtttttcatgtacatattattatttaaccttcactgctatgcttgcagatggatgtgtggtatattttagttaactcgctcaaggacatgcacagtaagcggtgcagctgaagtccagactgggtcaggctgactccacaacctcttaatccctatattaaattgatatatctgcccatgctatacatctacttgatctttaggttgatttattgatagtgacatttaatttttgttttcttcaaaattaaattcttactgtaaaactagtcaaggcaactgaagtttgtgtttgaataaaagtgtagagttaactgaggatttgtgtattctcattccaagatgagaagggagggagggaaggaagaaagaaggaaaagagggagggaaggaggaagggagggagggaaggagggaggaagggaaggaggaagggatggaggcaggaagtaagggaaggaaggaaggaaggaaagaaggaaacagtaaaggaaaagaaaggaaataaaaagtaacttcattcctctatagaatctctattaataaatgttattttttaaaaataaaaatacagttatttttcatgaatataaattttagaacatatttttcagtgctccttacctaactcccaaataatccattacttacatttctttttttgagatggagtctcgctctgtcacccaggctggagtgcagtggcacgatctcggctcactgaaacctctgcctcctgctttcaagcgattctcctgcctcagcctcccgagtagctgggactacaggcgtgtgccaccacgcctggctaatttgttgtatttttagtagagatggggtttcactcgatctcctaacctcatgatccgcccgcctgggcctcccaaagtgctgggattacaggcatgagccactgtgaccagcccatttcattctttataaccattatgaattcccacctagtttgagaaccactacttttgtgtggtttccaccctttgtgtgatttcaaaaaggctcgcctttaggcaaaatttagcaagaagtcaagccaatcaataattgcttgaagtcaacttttccagaataaaactgtataagggactttgaatttgaaggttacaatctaaagtttgctttgagatgggaataatacgtagtgttggggattattgtaaacctaagtgatctaattggaaattagaattgaaagtgggaaagtgaaggaggaaaaaatgaaggttggggagaaaagaaagcaatttaggagactctatagggaggaaaggatgagatgcatttcagaaacaaaatattaacgtaaacagaaaaaagagaaagcaatcatgacaaagcctaagagggctagtggaatgctagaatgaactcatttaccttcctttgatatttaggggctctattgcctgctaatttcatcactgttatttttcttacctcttatctttttccctgtagttattatcagcctaatattcattcattcattcatttacctgagttttcaggcttgtgcagagacaacagggtggggccaggttgcaagattgtgttcccaacttggaagtaacgtgggtaaggaaaaagtcacagctggccttagaagacacaagttaaccacatcccatgggtcagtggaagaaaacaagggaataattagaaaactgtgcaagatcagaagggagcccctgaagctataactgcaagaacctccagaccctattgcctttaaatccccttttaaaaggcaccaagtgaggaaaattccaagatgaatgggttacgggtctgaccttcaggaacatgtaggctgcctgccgatgtccacaacatcgtccctttcacatgcctaatacattagtgtgggccactcatttaaaatttaaaaaatttcatttagcatttaaaaattcatttgacagaagagatgtttcaaataaatagtcttcaaaaaaagcccggtctataagtctctgtaacacagcccatctgctttaggtgaagtgaggcagtaggcctggagcctcacctggttggctcttaaccacatttactttccaggagaagcctttcaccaacttcctcagaacctccaaaacaccaaggaacaagatcctgaaattgtccatagtcttaactttgttaataacagactgcatgcccctggaaaaactatttcacttctcttggcctcatcaacaaaacaaatgtggcctaaaatactttgtaagatggtttcagttgtaaacagcctgaaaactcttagtacaactaatttgggcaagtaggtttggctacagataaagaacagaaagacttagacagtggtatacattactctgaaatatttttattatgtaagtacaaataaatggatgtctaattgttacttttcaggtagcaacatttgtaggaaatgcattttgttaggaattttaaaatcactgaacagattgccatttagtttacattttcttctcacctgcagatcctgaaacctctgaacttttcttctgccacataagtcaaatatccatttatagtttttaactcttctctttggcccctaaaaatagaagatcattcctgattttaaaagtagcacttgtatgcatatatataatttttatctttaaaggaatacgctgatgattcctgactctagccagtcctttgcaaccttcaaaggattgtctccttggccctaagatgtaacattgttaaccttttatgacagaatcacgtcaaggaatattacatctcttctagttcctgtaccatatctttatgataagaatgtgtgcttgccatctcaaaatattgaccctctggtacaatcacttgtatctacttgaatacagatgtcttgttactatttctggaaaatattcagtaacaaatttttctctgaaatattgttattaaattttcttaaaaattgtttctaaccttctttactagagctcactataaggtagtctttagtttaagaacttcaacactctctgattttggtttaccattttcatttgtgcaaaatgaatgtgtacataagaatctgtatttccaacccaaagaggcattataatgaccgttaaattttccatccaagaaataaactaactccaccatccctgagtgtataccctgcccttctcactcttgtgttctttaattagacccaatgtgcaggacatgacttgactgaaatttatagccacattgagacatgcagctaaagaaagctcttagaccaggcatcatctcaaacttttaaagcaataggatcatttgacagaagtgtgactcgctatagtaattacacaggtgcaagttataactacttaatctgctcccagcatctctgttgcccttgagaagtatgatgtcctctagccaacatggctgttcatatgggactgaatctgcacatatttgaattgagtttttcaagtttagaaatgtgatactattttacccttatgtgccttccacaatcctactcctctcttaggtggatcagagtttctggaatccatcatctttagttctgcaatttacatctcagacttacatgtttctaggcataaatgcaagaatgacaacatcaaggcctatgaaacttagacttgtatgtatgtgatggtagacattgaagtttgttgcaggaaaatgtttctctgtcatcctaggaaaagcccccagtttctcagttcctcctcctccacacgacagttttttagtttttttagttttttagtttttttctaaaatggagttaagtccaggtgcaatagctcacacctgtaatcctagtattttgggaggctgagatgggcagattgcttgagcccaggagtttgagaccagcctggacaacatggcaaaaccccatctctaccaaaaataaaaataaaaaaaataaaaaaattggcatggcagtaggttccagtagtcccagctacttgggaggcagagcctgggaggttgagactgcagtgagccgtgattgctccactgcactccagcctaggcgacagtgagaccctgtctcaaaataaaatccaattatgatcatacctctctcctgttgatgtccatcagagtctgcaatgccttcagggtaaagtttaaacttccttctagaaacaatgttctgcggtaaaatgaccagggtctttggtattagatacacctggcctcaaaaaatgggtcagcccaggtataaccttccccatcttctgtttcctcatctgcataatggagtaacaaacattgtcaggaagttactggagtaattgtgtgagataccaaacataaaaagcctggcacaaaataaaagctcagtaaatgtaaatgtcctgtcttttgcctttccctcattgtctgcgacttacctttctaggttcctttctcccatgtgcatccccttccttccaaagcactcattgattctagcctgcagtgtatagtttcctgatcaagccaagctctcccacacctctgtaacttttgcgtatattgttcagtctccctgtaagtcttccctaccttcaccttttatagaaactgcagggtacctacttgccccttgagatagctattcctgaatttctcccgaatttaagcattcctcctctatactttcataaatctttcacacacctctttcatcctacaatgtcataatattagttggttttatctgtcttccttaatgtatccttaactcctgagagtggacgctacatcttagtcatctatgaaaccccagaaaatgtaatcaagctaaaatggctcactcatttcctagcaaatattggttaaatgactgaatggatgatacagggggcaaaataaatatggttttagaaaagtggcatggctgctgatctatcagtgcaaaaaggagcacacccacccactacatggccaaaaatgttgaaggcaagagactagatggcttgtgaataatatcaaatgaagttgtctttctgtaggaagtcttagacaatgtaatcttgggaggcgggtggatcacaaggtcaggagttcgagactagcctgactaatatggtgaaaccccatctctactcaaaatacaaaaatagccaggtgtggtggcatgcacctgtagtcccagctactcaggaggctgaggcaggagaatcacttgagcccaggaggcagaggttgcagtgagctgagctcgtgccactgcactccagcctgggcaacacagcgagattccgtctaaaaaaaacaaaccaaaaaaagaaaatgtaatcaagctaaaatggctttggctttccttcagtaaatggttactgtgggaatatatgtgaaatgaatatcaatactatgatgagaaacacatgcactaaacagctatacttctgatgccattctcaaatctgaaactttgcccaatttcagggacaaaagtgaagtaatatgtatccccagtgtttagcttttctcttgccatggatactaacagtgagattcctcagggactgttcctttaacctcgttagggttgctaggggctattgtgcctttcacaacacagcacctgcaactgggaataattgaaattttctgccattagctattcccagcagagtattctgagtcacatagaaagtgtcagaagcatataaattactgatacattttttaatcccatattccctcagggttggcgtttttctctcttgaaagtttcccccttaaggctgggcgtggtggcttacgcctgtaatcccagcactttgggaggccgaggcaggcagatcaagaagtcaggagatccagaccatcctggttaatacggtgaaaccctgtctctactaaaaatacaaaaaattagccacgcgtggtggcgggcgcctgtagtcccagctactagggaggctgaggcaggagaatggcgtgaacccgggaggcggagcttgcagcgagctgagatctcgccactgcactccagcctgggcgacagagcgagactccatctcaagaaaaaaaaaaaaaaaagaaactttccctcttaaaatattcttgtttaaatctaaattaatttcatagataccatttccatttttctaatgaataatactgtatcctttcctatctataccatgaagtttttctttgccttgaaaacccatttagatttatgatttctagcccccaaaataacttttgttcctatatccaattccttccctcacagttctttcacaatagcttcttttctcctgtaaaaccctacataaactccaaaaacatttctagttttggaaatcctaatccaagaggtcacatcactaacgcaaacgtagaaatctttgtaccaaaggacagaggtgcaagggaagtcgggagttgtggctgtgggaaagtgaggaggactctttggcatctgggcagaggtacagggaagccaggatgggggcagaaagaaagtttctcagtttctcttgtgtctacggttcatgcttaggcctctgcagcagccccaaggcaggtgagggtgatcagctgttccagtttgcctggcactgagggatttcctgggatgtggggcattcagtgctaaaactgggaaagtcttggacaaattaggacaagttggtcaccctacctttcccttgctgctgctgtccttttaaagtcctcattcctttgaaaattgcagtgatcttcagttcttcctgattttaactgtatacaaatattcaaagagcttggaccagcacatttctcagagagagctctacttacagtaaatgttatgtgacagagcaggatagcaaatagatgttacctggggcaactctaattgcttggtcatgactgtcgggagtaaagtgttaatagtttcttgcatatcctccaagagagtattacaaatactattctgcaccaagctctttgtaatttaatagtgtatcttggggcccttttgtatggacttatacagatcatgatctagagataatgatcattcttatttgacacatagtattgcattatgttatgtctaaaaacccatttaactctattgatagtcttgtgggtcatttccagtttttactacaattaatacaaataacactgcaggcatccttgtgcctgaacatctttgtgagtttacccattgaataaagtcttagctgtgaaactgaatttaaaattttcataaatattgccaagctgtcttctaaaaagaatatattaagttacaatcccaccatcatcacaagaaatgcttgtatttctatacacactgaccctgagattcacaaaaaacatattttccccatctaatttaattgcaaagaaaattagtcacctttcatacatttatgggccagttccctcctacctccaaagactcattgaatcaattatcttgaggagtttattttttatggatatgttaatgttttgagtatattaagaaaatgaactctcctcatttgtgtaaacttttcaaaaaattttaatttgtttagggttttttttttttatcatttagtcttttaaaatatttgagtagtcaaattcatcctttcagatggtttctggacaccctgtatcttttatgcttgtttttcctggcattcggtgcagtacctatcacaaaatagattctcaataaatgttttttaaataaatggacaacgaatgcatgaataagtgaaggatataatttattcttttcattcctcctcatgctatgtagagatttgcaaaatgaatgccaaaacatatctttgaacagaatttcatggcccagtatcttcaggcagtggtttttctgttttgttcaaaatgatgtccctatcatctgcatagtgctggcgtatgggagatatacgtattgaatgaatacataaatatagagaataatgagataaatagaacgtggattatttggagttcatcctcctgagctaatgatgggcatttctggaagtgctgggttgcaaataagcccagaccagagaggattgtgtttaaaggcccagaatctcaactgataatcctcagaagctcagatttacttttttcattccaagtaaattaaactggagtggtaagaaaaagaaaaatggttatgaccatcaaccccagaaacagggaccacatttaattgaatttataatgtccctaacatctctgctgtgtttgaaaggttaaaaatttcctagagaaaacagcttttgctactacttgccaaagtactcataaaatggactgattgctaagaacagaaaacaaaccaaatcaaaataaaatgaaccaaaaagcaacagaaataaatgtgccttaatgtagttggatgattaccacatctactctcctcagaccaccagccttcagagtaagggcacatccttccaaataagtgcatccttgtcagggacatttggtgaggtgcaaccccttcaatgtgtccgtttcctgggtcatttggggtcttaggaaaatcttcttgttggtgcgcactgaattgcacatgcattatgtaactcattgcaacccaatagctgaactcatggtttcatagctattaaaatatgccacaaaccaaaccacctgtgaggcgccaactcagcaaatgtgccttttcagaaagtagtcataaaaggtacaaaaaatgaggatgaaagaaccctgaataacaacctagagctcatatatttggagccatgaggaaaagtattccatgtaagttgaaggaagatagcagtcaggagcattggtgttgaagaccaccctcactatgagaaagggtcatatatataatgtggaatgaatcagagctaccactgtgggtcccctgttggaaaaactgcaattttggataattatgtgcaagcactaggagaaatgccagatgttagaatccatgtttaatgtgaaaattgcattttgttgtttgcagaacctcaatatatagctttctctataaaatgtgggcatatttctgaaggaaagaaaaatgccagggtttcgttttaacatcctgttacgttttagttaaattcaaaggaacatgacttttcaaagagaaaactgtctctctctcataaaatagcattaagtggttccaaacatatcttaggttataattgaaattggactctgtggaacaaaattaatgatggtttgttctcaaaggcccattgtcccgttgattttatcagttattctttgttaataaggtggtaatgtggtcttaagagcttccactactgagagaatccaaggaatcatagataagtaaattgatgtcaaatattatgactttttctctttcattcttgtactgtatctagttgcctcatctttttttctaaatctcacagtttttgatcaaattccctagggacagcttacatgctagctttatgagggaggtgagtcatgcaatcccaagaaagcaaaagtggagttgagggggtgaaaggaacagcagtagggaagaagagaaaccatgtacaaggtaatgcattactaagcttgtcagagcttcccaacaacaacaacaacaacaacaacaacaaaactagttgctaagttacaagggacattgcctgtgaggctgtgtcgtaaaacattccacatggagaagaaagggtgagcaatttttctgtgcataggtcttttgtctctcattggtcaaagtttgctccatggtacccttggccctcccagagtccctggggaatacagagcctttgtccatctcacgtgtagctggatggttcctgtcaagtcagaggccattgcccacgctaagcccgcaaggatggggaggtggaaaacatgaggcaattgcagtgataaccgctgctttactggggctgctgtggcatgcctgggaaactgggagagtggcttatgcccaaggggtagggtgggcagagctgacctggggaggccacaaacaggacctagtgtacttttctacagtatactagcagaattagaatgaatcagacaagagatttattaaattaagcttttgtaatgtcctgatgtagtgcactgtattttaatgctgtgtcttctgttgcttgagttcctaatttgtaccaggtgttgtgccaaatgcttcaaataaattaccttgtgaaatcctcacgactctatggactccaatttacaaatgagaaaactaagacttaacttgcttatcttcaccaagctaggaagtggcagagttaaaatttgaatccaggtctaaagccattggtcttctatgccatagaatcggcatccattttgctactcttactagaaaatcatgaatcctagctatgaattgtagtgaggaggaaagttttttctgtttcatgtttatgaaaaaatctctacctttttcattttgtgtttcatgcatgtgacagcattttcagagattttgtgtaagagtgtgtgtatatatatattgtatatttacagacagaaaaaaattgagattaatttttcaattctctaagtcataagagaatggaaaaacagaaatggacaagcagaattttttatcccaatgtattctttgacatacactggtcataatgctaatgttagcaaaagaaataaagaaatccctggtgcaatgggatgattgaccttcctttagcagaacagtgttgacttgttaccgttgtcaaatcagactgaacacattcaacaacatgatcatttctacttgtgggtttggactgacaaggacatttctagtatatcttgttgacatcaggttaataagctctaagcaaagctgaaaatgaatgctacttcccacaatcaagtggaaatgttaatattatcaacatgtcttaaaggccatgaagtcctatgcctgtatatgtaacaggaatagcaaacaggaacttttcttaaagggaagattaaactagtgttatttttatgtattcgttaattgcatgctccccatttttaaaactgtacctgaaaatatactgtaataaaaaattaaatttgaaatattataccattgaataaggtcctctggatagttttgagatttaatattctttatttcaatttacatgtatactgaatcacgtaaaagttatttaggtcagtacttccccacatttgttccttcatgacatacgctgataactatatttctacgaaaactgcagtaaataaaggatgtggcttgtgttcagtctcccacccactagcgacaagagccaagggaaatcaatagcttggctcacctgtcatctccactctttggcacaccattgagaagtctaatatgtgcaaagaaaagttaattttactttcaagggttatacctttgcttattccaaagaacggtgggggagtgtaccagggccattattataatgtatattattaaactttttacattttaactgatttctcttatagtaaaattaattatatattagctttggggtatacaaaattgcactttgataataatatttaggaattggcaactttgtgggcaaagttgtgggaactatcagaaaagtaaaaaataaaggtgggacccgaaagaaggaaggattgtaggttggagccatacgcgactagaaactaagacatgtatccttaaaaaccctcaaatctgtgttctgatgggaaaaccctgctaagtcaatggttcccagactttggaatttcaaaacaaaaaactgtgaggcccaacatacaattaccaactcttcatttttgccaaacaaaactattttcaacagaacacactaacatatactggaaccatgatttcatattatgacatttattttccacattctatatacttttaatatgcaaaacaaggacaaaaagggcagtcatctcccatggggggcttagaaatctctcattaatgtgtgtgtgtgtgtgtgtgtgtgtgtgtgtgtgtgtgtgtgtgtgttttaaattggccttattatttctttaaatttaaccaagggccagtaaaactcccttttggaataccacacgcccgtgctgttcaggaatgattatgataaagtcattcatgaggacatagagttatttcatatgctctcaaaaatgacttgcagtgcgaaacacagctactattggacaagacaacaacccaactttatataacaattttttaattcactagtacttgtgtatcagtcaataaagtacctggtacttgtgtactaggcactgggatggagttggggatacgaaagtgaaaaatatagtcacaatttctaccttatactctagtaggggaaagaaaaacaaaatgtatgattgaactgccttaagcaccatgaaggcaacatacaaattgctgtgagagcatataaccaactcagaaatcagccttaaactgagacctaaaaaggactccccctgtgccttttgtatatttaaggcatcttttttatattctagaaatacaatatcattgagcagatagattccaaagggccatcttctagctggatgaaatagaaaagggcaccccttcctcaggctaacagccctgcctgctgagggcatagttaggtgaatggatcatcactaatgaatggatggttttaaagaagggaataacatgaccaaatttgcatttaactttactcaatagtctggagtatttaaatatgattaaaccttttctttccattcacttgaatgaggcagaagggctattcaggaatttaaagttgactaaggtattgattgggtacaaaatttttactaggtaggtaagggcaggatgattccattagaaacaagaactttttctccagtgctctgggaagaattgattggttcagggctaaatcaccaagatgaataccttcttttgattcacacacccttttgacatctgggtttccctgaatcatatgcaatctaggacttacgcagaccactccagtttcacttacgaaatttgggttagccaacttaaacagtcatggctgtaatttgcttctgagttaaaatgctattattattttatgttatttatggattcctgcaaaggagaaagcatttttattttgataaattttgttattaatgaaattaactcaattttgtagtaacatagtatacagtgaaaatgtgctttacgagatgccgtggcttgtctctcaaatggacaatgaggctttccgaaacctttgtgcctttaagtttaaggaattgatttggcgtcttatctcagtgtacacaaagcttagttatcacctaggaaatattggatgtttgtctcagggagaagagacaatttttgagaccacaattaggttttgtagctatttgacatccaattataatcagatactcagtgaaacatgcattcataatgcaggccaatgatcatatatttggcttagcttttcactagaaaaattctttaaagaaatattgtccttccaattttagtggtactgaggaacagctctggttataaggggggaaatactatatgtcctttgttcaatcttactaatctttattaattttatgattttccccatttattttttaaaaatcattaataaaattatccttgattgagtttctcctatgtgctaggcattgtgataggactttagtaaacatcatctctaaccctttcaataaccctgcaaggtagggtcatattttatagataaggaaactgaggctcagagaagttatgtcttgaaattatatagtagcaagtggttaagccaggtttccaacacaggtttgtctgactctaaaaccagcatctgccccatctcctcaccattcgcgaccagaatgtgatgcacgtctaccaaaaagagagtagcaaaaggtgatttatagaagcagttatagtcctctgaagagaaggcaaaactattggggatagggaaaaagtaactataaagatcatatttatataatcgaatattaacttaatggcttgaattaggtggcaaataaaatatattagcaagcaatgttacaaaccatggtgagagctatgtagtagatgaagcagaatgatggctgggctcagggagctcatacatttggaacccagataaatctttgctccttcttcccagagcccatcatcactttttaaaaacacgtctttgctgggctcagtggcttacatctgtaatctcagcactttgggaggcaaggcaggaggattacttgagcccaggagtttgagaccagcctgggcaacatagggagatgctgtctctacaaaaaataacaaagaacaaaaccatctgaatttcatgcattccaacatatattattttgttccattctacttaataacctttacactagttgtgaaactcactgaaaacaaaggagaaactcattataattcatctaaacattcctgaaatatcactttaatcaaaaaattaagaaatattgctcagatttaaaagaaaaatggaaactcccttggcaagtgggtttgaggtttggtcattaggttttgaataatcaggagctatgtgttgtagtaggaaaagcataccatttagagagagacagctttagtttgtcagtcctgcctcttaataggtggatgaccttgagtaaagcatgacgcagcctttgggcatcagtttcctcacttaaaggtagaagggttgaaccaggtgtaagctgctgttcttccatgttatgattctaaatagttctagatggaattatgttgcacatttcatatgttgttaaacagcttctctctggaacagttgctcctaatctcctaataagcttactatgggtcactcagcaatcttcaagagaaacaaacattatttggttggtggataccaagacaattctgatgtgtttgtgtcaaagattggtcagatgaaatctaactagacatgtatcattccatcatcaagctaaatgaccttgactctaaacatcttaatttgaactgtagacatttcccaaatgctttagggtagatttggaccataatacactccactgtaaatggagaaagttcatcatccccataataattgcccccaaactgctaggtaggaatgcatactgggtttagtatgtattaactcccttgtgaattcagcttttgagagcagacctcttaacaagtcatgagtatttagagtgaaatatttaattcttagtgatactattttcctattctgctattattattcagctatgattattttccttctcctcccaacctcctatttctttttctttattaaaaaaaggagaggaggtgcatgctgccatctggggtgaatatgggcttcacgtggggacctgggcgctggttctgatccagagagtgagctaggagcacttacacaagagggtcttagccactgtgtcgggggaatagccttatatcaaagactgaagccttttagtaaaacctgaagaataatcagaagcagcattgactagtctctaaccttggttgagggacacacacacacacacacacacacacacacacacacacggctctgaaagctcagacacggaggacacgctgtgatccacttagccctctcttctccttcagggggtccttgcaggacagaacgctaaggaacaaagtcttaactggcaagctgccggcagaaggagactgtctggtggattgcagcgctgattaggaacggggagtcctttgcgtttcagaatccggtccacattttgctgagagcccaggcactgtgaataagaggagcctctgaggactggtttctgatgtcgcactaggcatgataagaatgccattgacgtcagcagagtcatcatcagggagaatggcaccccagctcttgaaaccacaccaagcaattgcagtgcttttgaaaattaaaagccggtgctggagtgtggggggtgaggtggggggtgggggggtggggagggaaagaagcaaagagggaagtcgtggctccagctgaactcttctttcttctatgcgtttcctgtattttaaaaaggcaggctcacggccctcctgtgcacacgcccgctcactcacacacactgctgcctgggctcattaacctaaattgggggaggtgggggaagaagaaagagagaaagaaggaaaaaaattaattctgttaacacttctgcatgcacataaaacaaactgtgccacccaggtgctggacagaggccctgagccacataagcctctgagaatcaaattgctgaggtaaaactgatatgctttaaatgtgtgttgatgaagagattacaagggaggaattaaacacttcaaaggagctactacaaagcaacaatcactcttcccccatccctcacacacgcacattactgtggacgcttgcatgtttgtgtgtctgcctgagaaaatggcaaagttggtttaggaagggaacactgcaggcatgttgtgatttcagctttcacaggcagctccaagaacatcacctccagctataattcaacggttacctggactggaaaatgtcttggaggttacgaagtctttgaattctttagtgtaaattgtctccgctttgaaattccacaattgatcgaatcctttcattctctttcccactcctaattgttccactctaactctccacccaccgccaggaatatgaaaacaacatagagtagaactgatgatatcagctgtataacacgctttattttacggcattaatgggcagctttccaagtccataaaaatcttttgctgatctgattttaatatccatattcttcagttatactagaaagaatgatttccgagatgtggaaatgttagccgggaaacaaaaggacataggcacataaagcaaaatctggcaggaaatgtgggtttaataaattgaattatgtgaaactcctatttcaaatggactgatactagaggagcagccctcgagagatatgcacagtaatgattcttcgttttcaaagacctgtttctttttgaaaaggaagaagccctgaacagcattcctttcaaatacacaaaggtagctaaagtacaaccttctcctctttcctatttgttctttaaaaaattgtaaaaattatattaagtgtgcttcttgtgatagagtcaataaagggagaaggagtttagcaaagcacatttactatatactcttaacccgtcttgcttactgtaataatcgaaagaaagatggctaattgtcttgcaggaatttgggttatcctctgaaaggatacaagtaaatttgtaacttgggtcgtattggctattttttgttctcttttgctttcatttttgttttgtctgaggtttataaatggaacccttctttcctttcttccttttttccttccttccttcttcccttccttttttcctttcttccttgctttctctctctctctctctctctctttttttttttttttacaattgtacttaaaagaataaaggattctgaaaatcagttccaggatccaataagggcctagattgtatatcacaggatcagagccccttgctctcaaatttatgattgtgaggatgtattattgtatttgggggatcaataagcagagccagagccttcacacaaggctccttgtgccccctcccccgctccatcccatgaggttaaaaagcactgactttgactttaacactgtgaacaaaatacagaacaactgtttcaattcccttcactatttctgctatgtgcctagattagatgttttctgacctgtctccctaagttgttcctgtcacttgtgtctgtcattcgctcccccatcgcatcctgcccaaccctccctgtctatgattcgaattgctctctgtccagatcatttcctgcagtgaaaaacgaagaaagactttctcccttcttcccacctacacattccttttgtcccccaagatatcccttcctcttgcctggaatcttcccaggccttaattgattgatttaggccccctttgcaccaggcaccctagcggaagcccagaaagccccaagagtctggatgtgttttggagagcaggctcaggttcactgcacactaatttgcagcaggaagtgctaggaagcccgatgagggatgggaattagcaaataaggttggcagtcaattgacagaggaagcttaaggaagaggatcattttgaaaaggaaaaataatttaatccttttcaggtgtgttaatttctttcgtggaccaaattaccatggacctggaatagttgagattttccctaaggtctggctgtacttcatagggaagaagcaagggtaagtgcagtaaatttgattatggacaccagtctaactctagcttaatgagccatggaaacaaaatagctcaatctcttctaactgctgtaatgcaacactaggagcattgagagcactgtggttttggttacacaaatttgtagtacaggccttgcctcagcatttgaacatttcagcaagagagctgaacttgcttcgttcttcatgtagcagatataagtcttttggaattaatttgaaaaaaaaagaaaagaaaagaaaagaaatgtacccagaaagcaagagatcttaaatgtatccaaaacctagaacaaacaaacattaacatttgccataattactgtgggtgtttttaataaaaatatatagatagataattttggaggttgcatttccccaccatcactgccagcctcatttttcttccatcctctccagaacaacctctgccataaatttaggaaatagtcaacctgttcacattttcatctttttactatatatgttcttattcacaaacgaatatgttgtagttataaaaagtcatcagtatcttttagcttatttttttaaatgcaacattatgtttgttggatcattttactcttgtcccagtgcaccctgtaattcccatgaattgacaggtagcgatagatcagcagtagtaaagtaactgatatgggtaggttaatagaatgacccttttaagaagggatctcaaagagggaggctaggtaagctacaaaattatcagggcgaaatgcagtgaggtagaagtgaaagcagcttagagtcagcctgggctaagataaatgaggagtggagctgcagctggaggagcaagagaatatggtctactcgagtataaatcaagcttgctggtgagcagtttaggactagctcctggttttacagcaagactttttatgtgatcttgaccaaaccactgcacttgattgctcctttctactccttggtcctcacgtgtcaaataaaacccctgaattgcagagccaaaatgcaaacaaatagaactcctcactcaacctccctcagtttataagtaaggaaatgaagacctagtaaaacattataacttacagatacctgtcagggcagaaccagaagctggacttgggctaggaaaagttgttcccccctgattacattttccaaaggttataccttttccacagtttctaaggtaacatgttgattgacttgacagttgtagaaatattaggaagtggtataaagccaagaccatgtttactaaacagtgctgctcttttttttacatcatacagatgagaaagctggtgctcagggaatttaagcaacttgcccagagtcacgtagcttagaagtgttagagccaagatttggaccccagtctttctcactttcacagacttgcttttaaccactgtgttatgctatgctgcctcagtataagctcctttcaaacaaaccacttccagtctctgacatgcaagcccagaagttttcagatttacaatggcatactttttttctatctgctaagtgttagatgtcacggtgtctgcaatggagtagagctttagaaatgaggataaaacatttggtttgatgttagtattaagaactccaatatccaaggcaggaaacttggtaattaatattttaaatggactggaggggtcacaggtattaaaatcaatattttgatggcaagataacaatgtaggaacaaataattggagatgtttagcaaaattatgaattaagtagatgtataaacggcagattatgaaagggaaacaaagattacctgggaagagttttgtgttttagtcaactgaattaccagaatgggcagaaaaaggaagtatcaaagaagggtctgctgatagaaaattaaataaagaagaagatgccatggaaacgtttttagtgcaaatacactattgctcatggctgaagacagaaagaagactatgtgtgacttccagatgaagttcaggcatagaggcagggctaaataaacaagcacatagacccgagaattctcgttgattgatctttggaaattcggtataaatatgatcagttcaaccatgccttagctactggatcaaaggagacatctaccggctttgggagataggaatctggaaaattgacagactgaaaaaaccaaaaccaaagaaaaaaaaaaacaaaaaaaacagagaatgcagaatgccattttaaaaaccctaagaggctgtgtctgatgttacaggactctttgactccattagtctcaattctaatatttaagttaagtgattgtgggcatagaatttttttcaaaacctgtttcgaaatgaaggcttcccatacattgaagttaaaagtggtcttgagaaaagaacttcttaataggtaaggggttttactttggaatgttgaaaatgtttggaactagatagaggtggtggttgcacaacattgtaaatgtgctaaatgccactgaattcttgactttactatttttaagtttatgtgatatgaatttcacttcagtaaattatctttgttggtgcataattactgtatatatttatggggttcatgtgatgttttgttacatacacaatatgtataatgatggaatcggggtatttacggtatccatcacctcaagtatttatcatgcctgtgtgtcctctttctagctattttgaaatatgcaatacctgttgttaactctagtcacctaatctgctatggaacattagagcttattctatctgtgtgtttgcacccattaatcaatctcttcatcccctcccctcccacctacacactcctcccaggctctggtatctatcggtctaccttcatgagttcaagttttttagcccctgcatatgtgagaacatgtgatatttatctttctgtgcccagtttatttcacttaacataaagatctccagttccatccatgttgctgtaaatgacgattttattcttttttatggctgaatcatattccattgtgtataccatgttttctttctttcttcctttctttcttgctttttttttttttttttttttttttgagatagagtcttgctctgtcatccaggctggagtgcaatggtgccatctcagctcactgcaacctccgcctcccgggttcaagcaattcttctgcctcagcctcccaagtagctgggactacaggcgagtgccaccatgcccggctaatttttgtattttaagaagagatggggtttcaccatattggccaggctggtctggatctcctgaccacgtgatccgcccgtctcggcctccaaaagtgctgggattgcaggcataagccactgtgcctggccgtataccacattttctttatccattcatctgttgagggacccttaggttgattctccatctttgctattctgtatagtgctgcaataaacttggggatgtaggtatctctttgatacaccaatttcttttcctttggataaatacccagtagtgagattgccggacatagtggttagttctatttttagttttttgagaaatctccatgctggttttcatagtggctgtactaatttacattcccactggtgatatgtaagagttcccttttctctgcatcctagccagcatctgttattttttttttattttttattattttttgcatttttaataatagccctctaactggggtaagatgatatctcattgtggtatcaatttgcatttccttgattattagtgatgttgagcattttttcatattggacatttgtatgtcttcttttgagaaatgcctatttatgtcctttgtccacttttaatgggattgtgtgcttttttactattgagacgtttgagttcctaatatattctgaatattattcccttgtcagatgagtagtttgcaaatattttctcccatttaatagattgtctcttcactctcttgattgtttgctttgctgtgctatacagaaatttttagttcaatacagccccatttatctatttttggtcgtgtggcctgtgcttttgaggttttagccataaaatctttgcctagaccaatgtcctgaagtgtttcttctgtgttttcttctagcagttttatgtttaagtctttaatccatcttgagttgatttttgtatggtgagagataggggtctactttcattcttctgcttatgggtgtccagtttttccagcatcatttattgaagagatctcctttccctaatgtatattcttggtgcctttatagaaaatcaaatgtatctatcattatgctctctgtctactctaaatctatcagtccactctgtaaaaatgtggatttgtttccaggctctctgtattattccattggtctatgtgtctgtttttataccatgttgcttttgttactatagcgttgtaacatatcttgaagtcaggtagtgtgatatattcagctttgttctttttgctcaggattgctttggttagttgtgctttttttttggttccatagaaattttaagtttttttttatttctgtgaaaaatgacattggttttgatagggattgcattgaatctgtagattgctttgagcagtacaataatttttttttttaaagagaaagggagaaagaattgggcactaagtacatcagagtagatgtttatcaatttttttaaaaatggtcttggctaccataaactgtgatgttcttgagagcttacattgtgtcttgttgattttggaattgttgatactcaaagtgcctgacacatagacttgattcatatgtatttaatcaatgaatgaatggataactctgacctcctcttagtgaagtgcacgtcatggggctaccacttgactatatgctgtgggatagatcaaagaaaggtaggacacaaccttgaacaaaattaaagtaaccttcagcttgtttataaaaagtgttctggtggagaaataatgaatcttttcagattttagagtgttgctgatttgatttcaatttgcatttttaaccatcagtctctgtggaactttagtttataggtaggacttttgattgagcttggtggctcacacctgtaatcctggtgcttcgggaggccgatgtaggaggatcacttaaggccaggagtttgagaccagcctggggaacagactctactaagaataaaaaaattagccaagcagagtagtgcatgtctgcagtcccaactacttgggaggctgagcctggaggatcccttgagcccaggagtttgaggttacaatgagccatgatcccaccactgcacactggcctatgcagcagaacaagaccccatctcaaaaagcaatgacacacagaaaaagcagaattttaatttgttctgctcttgtctctagcacttcatatccatttctctgaatatgaacagtgggaaaggtagtggaattgaaatggatcatagaatgtttcctctactgataatttttactccatttggagtatgattgaagagctaatgtcaagatgcacagcaggactcaatgattgaaaaatagtgttactgatgtaaaagtcaccatattttaagctttctttatgatagtcttccattatttcctttgtcatattagcaccactggaaaaacacaagttatacgtagggtagaaaatgtaatgacaatttggtgttttataaacaataataaatcagctttcatgaaattaggctatgtcctctgctctggtgttagaacttacttttgcctgagctcactaaataattatttcaatttcccagataaatgtacttctgtggacagaggccatatgctggtagcccctatacaatatatagagagcataaatttcctcttctctcttggtatttaaaattaggatttttataaaatgcattttattcttattttgcttctccatcattagaaagattcctggatctgtaaaccaaaaataatagtaataataatgataataagattttggcaatttaaagagaaattcactttcgtgaatatggtcacgccagctatcttttgaaccttaaaggaggcaggaagaacatttgaattaagaattttggagtattacaacctcatttggttctcagaagctttttttaatttcatcttctccacgccagtttatacaattctctcatgcctcactttacttttatatcttttcttaaaaacagtttaaattgtatcctccccaccccactttatacaattctctcatgccttactttacttttatattttttcctccattcttccttgtttcattcattcactctcccaagtcctctggcctaagttttatttgtgtggtattaagcagagaccaacagaacaactgtgaagacttcttggggataaaccaggtttcacttgaattgtggtgcgtctgccattggtgtggaagcagggcagaaagaggacagaggcataccagcaagtacagacatctaaacacaaagagaggagaacaacctcagggatactccctcagtgcctgggaagaaagcaaaacttaaagtgctcatagaattgtaaataaactctctcctctttgaaatttatgttcgatggttgctgtgtagttgcaacagtgtcataaagtccatgaggcctattttttttgagtaatcaatattgtggaaaagtgctagagcagacctaccttatataaattaatttgtttgaattgctctattcactatgaataaatatttattggagtaccttctatatgctggggacctcagccatgagatacgcaggtggaaaaaataacacttaagcagcttattgtatagcagagaggtggttgaattgatagacaattaaaatacaacgtgttgaaaggcctgttaaagccacagggtcactcagtggcaggagggattcagtcagcctgggccagccatggcaagtaagtggcctttggaaagttaccaaggtaagacatacctgatacgttcaagaaacaattccaaggttcaataaggccagaagttaaagggcaatgtaagccctggaaactgaggctagaaaggtagaaggatctctttttaccacacactgtgccgggcaccatgaagaatacaaaatagctagctattatggagcctacactttaatgtgtgtacatagatacatgtccatgttggaatttaactccttgagaggtcatgaattacttagtcccggaagcatttgaatttatactggaaagctatagtagagagttgacaaaatattttaaatgtagtaagaagaatttgacaatctattgtgtggtatgctagcaagccagttctccttcctccttttctcaccatcccaccacccctcacaaaaaaaaaaaaaaaagttaaaaacctgatctgcagtgtttgtctatggccatggtgcaaatactcctcccatggctggttccaagctaccactggttcaacagttcttttgcagaattcttgaatctttaacacttaacaagatccagttccagcatattcctgcaacagcgattctgcagttctcaatgtcaaataatagaaccaaaaagtcatataagtactacaaagaagaagagagagttgagagccagcttagccaggaaatgctccagggggaagtaaggcttgagttgggacttatagataagaaatgtaaataaaaaggaacaaacactcccaccgtgatgcacaaatattggatcatgtatgtgtgtgacaagtgtggccgtctgtagtggagggtccaggtaaaatttaggccatgaaagccttggtctgtcaaactaatacattttgttacattaaagttagtagacagccattaatggtttttaaaaacagatggtcatagcaatgttttgacaaaagcaatttttaaggaagattttgtttttataaaaagttgaattattgatagcagtgagaccccagaatagaataagagacctgcctcatgtaagtgagagtaattcaattcagcagtaatcttggaaatttgtaacttctgtggtgagaaattgtatcctgggatgttgggtaaagccactgtgaagccaaagaaattagtggctaaacgtagagaaattaagatgaaggaactggcacatggagccactgtgtactataaagtatttttattggtatttagtcttgctgttattgttgctaatgattgtattgaataattaccagctgttgttagttatttgaaattaggtgcctaaagcaacctctcatcttgcagaaagtcatctttcttgaaactttttaaaaacttgcttgaaacatggagacttggaatgggacgtctatcatagtagcacatctgaaatccttctcattcctgctgtcatttctgtcctttcgcagtccactttgtcaccacccccaccattccttgttctgcctgcaatccagctttccagtcactttctctacttcttgcctggctgcagcgtcatcatttaaacagctctgggttggtatctcctttcaccagaattcctgcagccgtggagtacgtgcagagcatcttccttttgaccctcttaaaatgctgaggggtgtttccgacacacattgctttgtaattcaataatagggcagttgtgggttctttttattgcagttatgctgatttttaaaagcactctgagtaagaaaggaaaggtagtaaaatatacgtgtacctcgatgctcattgatcacgtttgcacatgttcttgccaaatgttgtttttaaaacctgtctctgcaggtctgagctgtgaaagtttgggaaatcagggtcagaaggcaaaaaaaattcgtttgtatcatcgtcatacaatataaattacatgtagcatatacatagaaaacaatccaagggatgagcttcctggaaatcattccttcttgtttactctgattatataatggggaattgtatgctttatacaattttaatttcttgaatatatgtgctcaaaaaacattataatgtggttcagtactatatatgctgaaaacaggttgctaatgaatttggacaaagattcccattttatttcctgtacgtttacacattttttggctgtatattatatttactatatatatttattaggactacagcaaacgctaattcatcgactgagataagaaatgtgttttccattaataattataaatctgccagaagattgtgagatttacattgttggggatctaaacaaccaaaatcattgcaaagttattttaaaactattattaattatttatgtaatcatagattatggcttgcagaagactgaagaaattgttcaacaaaccatgtaggttttgtggaagagcagtagactttgataagtaagctcagagtggtccattaaccttttctctatatgtacattatgtgttgataagcatgatatctattatacctcaattattaataacaatatacatcctaactattaagaacttagcctgcaaccctaatagtgtcccctttcttctagaacatagatcagcataaggaaggaagcaaaggaggtctctaagcactcaaaatagatgttcacaatgttcactcactgaagataatgtaggtcattagccagagaaatgtatgttcatattttagtgatgattcatacaagcttggtcatgtggttctaaaccttctataattggatgaagcaaattaagaaaggctgggtaggagatttcagggaaagtcacaactgatattagccaaatgtcagctgatggcctgaaaacaacaacagaaaaagaaaatctacaaaatcatttgaaaaccacagacatagctatttggggcctttttgaaaggggcaataagctcaacccatctttggaaacactgagcgcatcctgtctggacaactgagtataatttttggtgttcaaactgatgaccccaaatcatcaaaaaatacaaaattatattttgctcaatctgtattgctcttctatattatggtaagatttctgtttagtgcacttaaaagtaagactacccccaaatttaatccccatccccttcaatgtctcctcctggacattgctccatctatcgccccttctccctctttctttgacctactctttgatggctgcatctccttcaaaactggttgaagttcctaaggaaaaaattcccttcctctttgatcctgtatcttccatcagttattaccacatatctctattgattttcgcacccaaacttctagaaagtttacacttatcattttctttttcttttccccccacttattcctctacccccttgaagttagcttgcagccccaccactctgttgcaactactgctgtagttcctctgctctcccaattgccaaaccaagtagatatttttcagttcatttctcatcaagtttctctaagtcaattgccagtgtatccctctcaaaaacctttccatctttgcatgaggtcgtacactctttcttttcctttccccccacccttcctttgacctggggttcccaggatcccattctccattcctgctttcctcactctgtgtgtcttccaagactgacttgtgcattcttattttaattaccacctgtttgctgaaagcccctaaatttatatagaaatccatcttaacctcttctgcaaagcttggaaccccaatatttattggaaattcccaactgagtatcccatgggtttataaaattcttcatatccaaaaccaaatttagcttttcctctaaatttgtgcctccttatatatctcagttggtgacactacccagctatcatgttcagaaaataaaataaaaatacgtcataaaagcatcaaaactctataaatttatccatgtaaggattgccaccattaatatatactttaaatccttccaaatgtttgtatacttgtatatatttaaagggatcatatttggtgacttactgctataacacatttttcccatttaacaaaaaaaaaatttttctgcatcaaagtatacttcaaaattatttttgtagttgctcatgttctagcagttatttaactaataatgttaaacatttacatcatctttgcaactttatttctcttgttgcttttttcttaagaaatgactattgaaaatgacccccaaaagggtatataatatcagtgataaaaattagctcttggaaagggaggagagaattttctagtgtatggtagtagcagtaacagtggcctagttacactcaatatctcaatatgtaatgccatttatggacagcttactatgtgccacactctttaaggactttgcataatcctcaccacaaatctgtgagattggatacattattgttcttatttcatagttgtggaaactgaggcccggaggagtgaaatactaggccagggtcacacaagtagtaagaaacagagccaggagtccacctttggcagtctgtttccaagattggtcacctaacacaatgcttatctgccttttgttgtaccctagggcatcctttctaccagagtgtaccacttcgctttatgtttcttagaataaaaccaataaatagtgcagttagttagctaagttttcagaaattttgatagatagtgtctagagaaacaaaaaagacacaatttctaagatgtagtaatgaatgtttcattcatgtcggtgattattttgatttgttgatgtgtttttgataacagagtaggcaaaaaacataccatcaatttaataatggaatcctaagtttaggtttaacatgatttttgaagaagaatcaatgtgcaaatgttgatgtattttcagagttatggttcagaaatgtgaattattcaaatctcatatcagaatctaaatttttaagaaaggaataatagaatatagtaggtcccctaccatcaattctacttctgtacccctattttatcattcatatttggcttgctagtgaagatgccttgtatctgttgtatcactgggtataatgtctggcatttgcaggtgtgcatgcaaggaaggaaagaaggaagtgagggaaggtggaaggaagagaacaaggagggaagaagggaagggtagacactttgggaggccaaggcggttggatcacctgaggttgggagtttgagaccagcctgaccaacatggagaaaccccatcgctactaaaaatacaaaaattagccatgcgtggtggtgcatgcctgtaatcccagctactcaggaggctgaggcaggagaatcgcttaaatctgggaggcagaggttgtggtgagctgagatcgcgccactgcactccagcctgggcaacaagagcgaaactctgtctcaaaaaaaaaaaaaagaaagaaaaaggaagagaaaaagaaaaaaggaagggaagggtagaaagaagagaggaaggaagggagggagggttgaattatagatttccccaactgcctcccacacaatgtgctctaaccataaattcttcatctcagttgctcaggccaaagcttgagaatatccctgtgtctactctttttagaacatctcgtatctaatacattagaactcctgaagcctctgctctcaaaatatacccagagcccagcatccttgtcaccatctccatggttaccatcctattgcaagccaccatcttctctggcttggatgattgcagtggctgtctaataggagaccctgcatctcctcttgctgcataacagtctattcaaaagacagcagtcagtgcaaatcatgtcattcctctgctcataaccttgcaatggctcccatttccctcagagttaaaagtgattattgtggcccacaacgtgtagcccaatttgacccctgtttcatctctggtcttctttttaacacttctttctctcattcactcagctccagcccattagcctccttgctgatcttcaagcacatcagtcacacttccattttaagaccttggtgctgcatgaagtgctctttcccccggtatcttagggccaattccattgctttaagtctttgcttgtgtttcatctccattaggccatccatgaccatcccattttttaaatgcatcgcacattaataccattcccaatgtctgctctattgtatgtatgagtgcttgtttcatagcatgtctatccttctaacacataatttactatatctattgtttattatctctctcctgtactagactggaaactaccatgtggaacaatcttcgcctattttgttcactgatacagatatatatacacaacagtgcctcagccatgctaggttgctcagtacattcttgaataaatgaattatcgatgtactcagttctgttacacagatgatttggcttctttggtttcccattaagagccttgttttctttgccaaataattgaaagtttcactcagaagataaggaacatcaaagacctcaagctttgtggtcttggaaagctgtggctttggtctctgtctcattccccttgggatttagaatagaaaaatgcaggtggagaacacattcaaacatcccacactttatcagtattttaaaagaaagaaagtatggctttttttttctcaaaacaatgtcttagttataaactgaatttgtataaatggccagttgtacattagggcagttgcacaatagaaagcatccagggaacaatcataacctcaagagcctattggaaagtgggatcctaaatagctttctatgatctccctagaaaactgtagaatttccccagagaataagccagcattttgttgaccattctgcaattccaggatcatgcttgcatagtcatagcttggaaggaggcaaattgaaacaagttgaaaatctgcaggaactatccccagtgagaccacagaaaagccagaagaagaaaaggtgggatttggggtagagaacgagccacttctcactagtttgcatgaagcattgaatatcccaagggagaaaacattgaagttctatgagacaccaagaaaagtgtatagattatcacagcatatggatagaggtcatttgttccctccctccctttaaagaaaagtagctttgcaagccacagtttaggaacaaatggactttttgacatagttcaaatcctcctgggtgtggaggcattgacaggagcaatgtcataaattggttaaaggttgcagtctggaatcaggctgccctgaatcccagccctgccatttactagctgtgagaccttgtgcttcctaacctcagttttcttttcttttcttttttgagactgggtctagctctgatgcccagtctggggtgtagtggcaccatctcagctcactgcagcctctgcctcctggactcaagcgatcttcccacctctgcctctcaagtagctgggactacaggcatgcaccaccatgcctggctaatttttgtatcttttgtaaagatcgggtctcgccatgacacttaggctagtctcaaactcctaggctcaagtgatccacctgcttcagcctcccaaaatgctgggattacaggcatgagccacggtgctcaactaacctcagttttcataatggtaaaataggaataccgatagcacctcccttggtataaggattaaataagataatctacatagtgcttgaaacaatgcctaggcagtgttcatcaacagttagctgtgtgctgtgtacatgctggagctgctaccttgtagaaattttaaatttaaaatggtgtgtagttggaggttaggagttactaggggtatcgcctagggaaagacagttggttacccagacaggtccttacagagtagtgttttccctggagaattaactatattccagaatctgtcctcaaccaagcagtctcagaaaggtgatcttgtcacagcctctgagtaagctgattcaaactctcaaaagctcacaagagccttaaagccagagtatcagctgattccttaaaagctacaaagtgttttggccttgccaacatacgcattctccctcttatgggtaggtttagaatgctaaatagtacataacatggatttagaatagacagatttacatatgatcagaaggctcagtggtcatagttttgagggcctaggacatgcatgtgagcagtagggagatcatcacaggaggatgggcacactctcgaggctcatacaggcgctccctctctccatgggcagcacaaggcaagtctcctttgtctttgatttacttgccaaccaccctcattctaatgggaactttctttttccaaatatgttaacaccttcaagtaattactgtcagcgtccagcctgggagtctcttggacacagtttttcataactctagatggatctcataatttgcccctgaaagatggtaaataattttacttctcttacttctggactctaagggggatacttcactcttgctccttgacctctcctctctagatcccacaagccaaaaattgttggaaaggattaatatgagctgggcccaataggctacagcatgcaccagcccctaaagccagctttaggattgggcggagtgtcagcccagcttccaccccacttggcttattcagcgacctcctgcaattgtcctctgctagcccttggcagatcagaaatgttctaaagattgacctctattactttgggctttccttaacttggcatccatgaaaagatccacttaaatgctccagattcagtgaagtctccttatcagagcttcttatagcacccatacttttctttctcagcatttattatgaatgtaatcaaatcatactttgtgcatgttttgttgtggttgctgtttaatgactattttgtccatgaaagaaggaactgtgtttgttttatcactggtttatccaagggactagaacaatgtatggcacatacaggatttaacgaattttttttaatgattaatgcccctttagatagtgtttttcatctgagtgcctcaacttctatgtgcattatgaaactgatatagtgggtcacaactatcagtaagaaaaaaagaactggaatagagtagaaaaagatgagaatgtatcacgcatagggaataacttttataaatctgtttcagtatggataggcaggcctacaccacacacacacacacacacacacacacacacacacacacacacacacattgagttcctatgaatttgttttttttaatttctttcttttttttttttgagaaggaatctcactctgtcacccaggctggagtgcagtggtgcgatctccactcactactgcaacctctgcctccctggttcaagtgattctcctgcctcagactcccgagtagctgagattacaggcacctgccaccatgcctggctaattttttgtcgttgttgtatttttagtagagatggggttttgccatgttggccaggctggtctagaactcctgacctcaagtgatcggcccgccttggcctctcaaaatgctgggactacgggcgtgagccaccgcacctggccaatattttttaaggtaagaattttgagaaacactgtcctaggttccctctaaaaccgaagatatcaccctatgttcagccttttagccctaatccttttcttaatcttccctatgaccaaatattaccatgcacacatgcacacacatacacacatgtgtgcacatacacatgtacactaatccatctaaagtgctactgttaaggaggagcaatagaagaggtgattcagggaatggtttttgatggttatttacttttataatagtttttatttgtaaaaagaagaaacctagagttttgtatcctaaacaaaatttaggattaggatacaaaataataaaattcaaaataagtcttgactagtgagtgtagaaggacagtgctacatctgaatctccagttgggtttacgcattttgtatttatcaaaaggcagtagtgatttaaaatgttgataaacactcagtttcagttttctattgctgcaaacaaactattccagaaagtgatgtcttgaaacacaaccattctattttgcagtctgtgctgggctcagccgggcagtcctgctggtcttacccatggtccccaatatggctgcagtcactccagtagactggaggctgggcttagctgagatgacctgctttctttctttcttcatgtagtctcatggcttttctctctctccatgtggattcctcatgtgaactctccagcaaggtagtcagaatttcttccctggcaactcagggctgccaagaacacaaaagccaggctttcttaatgtttaagcccagaactggcatgtggccaattttttgtgttctgttggttaaagcaaaccgagtcaagaagagcctacacaagtagtaatattacaagtatgatgaaatatcattctcttcttagaccaaacagcatattcctccctccactcttaccctctataatgttttgcttttgggagttcctttatatgaaatgcctcccctctacttctccttctactgaaatcctactcatcctgaatccagctcagagctaactcagtgatttccttcatacatctctattatctcatcctggaaataatcactcctgccaggtgcagtggctcatgcctgtaatcccagcactttgggaggctgagacaggcagatcactgaaggttgggagttcgagaccagcctggccaacatgatgaaaccccgtctctactaaaaatgcaaaaattagccagacatggtggtgaatgcctgtaatcttagttacttggcaggctgaggcaggagaatcacttgcacctgggaggcggatgttgcgagccaagatcgtgccactgcactccagcctggatgacagagcaagactccagctcaaacaaaaaaaagaaaaaagaaaaagaaaaatgccctcagcactctcatagcattatgtctatatttcatattatgtcttgacatataactttacacacacacacaagcacacacacacacagatgtagcttgcttttagattttaagttgcttatctaagattgggtgatcaataactgtttttttcaaaaaacattaactggttttctatgacttttaaatgacagctctaaataattataatttctcactagtttaaaaaggcaggtggtgggatattcaaaactattggagaaaaaaagctgatgtatgctaccagcataaaacaacaattgccctttacatcttcagaaacccctgtactgtgcagtcattttcaaacctggatttttgtcttgtgttttttccaaagtagtatatatttaactttgtaaaatggtgtggtgttttttggttgttgttgtttttgagatggagtttcattcttgtaccccaggctggagtgcaatggcgcgatctcagctcaccgcaaactccgcctcccgggttcaagcgattctccttcctcagcctcctgagtagctgggattacagtcatgcgccaccacgcccggctgattttgcatttttagcagaggcagggtttcaccatgttggtcaggctggtcttgaactcctgacctcatgatccaactgcctcggcctcccaaagtgctgggattacaagcatgagtcaccacgcccggcctaacatggtggtttttttcctacctaatatgaagatacttaatgtcttaccttggaaaaatatacatttcaaccagtttatattttacagaagtgactgagaaatcataagcctttgtgcaataacatcatcagtcaaacacataagcagattctaatctgccctctctatcaattagtcttaaaactacaagttgttcctctataccagctacacatgtgcattggtagtcttaaattgtgatatgagcccttaggtagttcacacctttccaaaggaagctcagtgaacttcctgaaactgtgtaaagaattgtgtgtgcagtatgtgcatgtacattatctgtatttttctgggtggatgatccagtatcctcatcagagtcttaagtttgagaaacccaattatatattagttgtaaatctgtttactttcttagaattcttctcacattaaaactaagattatatttctatttcataggtaaccaatttcttctggagcaactggacacttacacgaacacttccatctgtctttcatctttacattttatttctaggtattactagtgttaggtcacactccctcctatggggagattctctatcacatctctagaacttcaccaatgcaagccttcttaaattgacccactcgctactgagtctgacccctgggccagtcacatcggtgcttgttagaaatcagaatcttggaactaaatcagaatctgcaatttaacaagatttctaggagtttccacagcatatttaaagcttaagaagcacaaagctggtgcatctaataccccactttctgctttttaatcttgcaggatttatgttttaaattctttataatactattaacaattatcatttgatttctattttcatatcatctgacagttttgattaaatcctttaacctcaggatttgtaaggggtaaggggagtgggttaactaactgatctgattatcaaataatgctaccattcaggacttatgcatagtttctgtgattctcaatagaatttgatggtacctacaacctctactccttgttttagtgtctatgtttttccactgtgcttaaaaacatttaaagggagaggctggaaaattattttaagatgaatactataaatgaaataactaagattagaaaaggcaatgataatactgaattacattggaaaaattcagtttacaaaactctgaaaagttcctaaggcagaattttgctgccccggtttctcataatagacccagcagttctaagttaagcacacatctttttggctatatggtgtatataccagactatcctttttctccaaaatttgactttcatctcaaagagtttaaggaatttgtgacttggtgcgtttgatgtggcacagttccacatgtgagggatggtgatttggatagcacgacagaagtacgtgccaagaataattggcttctgtcttgcggaacagctcaaatactatgtgtatcacagtatgtaatttgggtgtacaaaatgcctgtagttcaaagtgctttactcctctgcagtggcaagctgagcttcctgttggctgattccttatgtttgcagtaaacaggctgggtgcagttagaaagaaagcatccatctagtaagtgcattcacatcatccttcaaatgccataggccttagctccaggacattttctgcctgtctccttccctccctcctttctttcttttcctctctccttccctctttcctttgttccttctttcctccctccccttccctccttttcttcctagttccccctttctttcctttcttctattgaataaaacgcaaagtaattctttttctacttactttgattcttatcagctttcttaagcagtttccttgccgctgttgtgaattacatggggctgtggtaaaatgtggcacatttcaaggctatgtatccctttagattctggttcagtaagcttggaaataaataggagagcttacgcttttaactactagcctgcgattcgtataatcatgttagtttgagaaacactacagtaatcacacatgtaagggctttggagtaagatggaccttggttatccaacgcttactgtgtgactttggtaaattacctaaacttttctagccttggattttaatgtgtaaaagatagataatactaactcagtaattctttatgggttccatgagacaatgtatttaaagcacccagcatactatctggttcatagtttacagtcaataaatgttaattccattatttgatcacaatgtaagactattgaggtttaattttgattgttttttcaaaagtttgtaatctgttaggaacaatttctaaagtaaaattcagaaaacaaaaccatcaaaatttaattcagctaacatttttgaggttctatatagtctcgaacatatattatctaattcgattatcactataaaccctgtgtatagtagatattatcattcccattagtggatatgcaaaccacggctgtgggatagttttacatttagtaagtggcagatccaagtctagacagcccaggctggttctctttatactctgcctggcaacatttgccttcatcactgtctgttttcaaaagtaactaacctctacatccctgctcacacatacaaatagctctaaaggtacaaaataaagctaattttctgagcaattcattttattcaaatcagtctaatgatctgttccatgaaaaatgattatgtagctcaaaggtcttcaaactcgtctcaaaccaggggtcaggcagatcatattcacataaagggagaagcttgccagccagaagtcaataaagattcctgggactggggtgacctggaagctacaacctgtttaaaggagacagcttctgcctagctccaggctagtgctcaagtgccaggatgtgggctccctattgtcaaatcttttttttttttgcttttttaagactggaagaaatccaatatttaatgcgaaacttcccatttttgaacaacgtgtgtgggccaaacaagtcacatctgtggaccagatctggcctgaggattgccagtttgcaatcttgacctaattgcccttaattcttcacttctcttgacctggtaaatactccatttaaatgagtattaggtatgttctgggcccttttggactgggtctttgtaatatatacaaatttcaaagactgacctttagtttttcaggttcagaattgattttctcagaacccaattagatcaggtgctgtcactgacactcagaactcatgaactttatgcaagagcaagaacatgaattagggaattcacagtgagaaatatattgacaagtagacaggataccatattggccagatcagttcattctgtccttgtagttcagccccttgagaaacaaacttctaattagaagctgctttgacatatatggagtcagaaactaggaactgtagactttaaagggctttcctgcattgggttttgagattcttcctccttttatggtagtcttaacattcggctgttaagtgttatgctccccctccccaggcatgccaagtatatactgaccaagtgtcttctttatttagctaccatatgagtggttctcaaacccatgcccttgttaaaacacagattacagagccctatgccccacaaattctgattcagtacttctggggtgggtcctgagaattttccttcttataagttcccaagtgatgctgatgctgatgaactgctggatggggaaccccctttgagaagcactgggttcctctatcatcttcagctgacaggctttttcccctttgaagggttaccgctattgtctgtgtctctgctttaatatgctaatatagcattatggtcatatccagatcctgaggttggaacctgggtcttagaacaatttttaaattgtttatatttttaaaggtatttgatttattaaaactatttgattactttatttcatcaagtccaaggtgccattgattataaaaacatgtctggattttagaggcattaaaaatgtaggggccaggcgcgatggctcatgcctgtaaccccagcactttgggaggccgaggcgtgcagatcacctgaggtcgggagtttgagaccagcctgaccaacatggagaaaccccatctctactaaaaataaaaaattagccaggagtagtggcacatgcctgtaatcccagctacttgggaggctgaggcaggagaatcgcttgaacccaagaggcggaggttgtggtaagccgagatcataccattgcactccagcctgggcaacaagagcaaaagtctgtctcaaaaaaaaaaaaaaaaaaaaaagtagggaaaaaattaacagtttcagaggtactgcaaattagtaaataaagcctcagtttggggcagtctcccctggattatgttgtatgtgtgtagctcaactcgatgggcacagttgaaggaaggattccctggtatgtttgttaaacaaacataaggtgaattttaagcctcccttccccaattcttagtggaaaagacactactggtactgtgtcctatggctgactttgtcgtctaattgaaatatcttattattgtatgcatcctctcctacttaaatgtgaccctgaaatgccagatctttcctttggaatgaatcttttttgtcttattggactggtagggctatgcacttaaaaaaaaaaaaaagttgattattagactcactgtttccttggccagtcaggaaaagatatttaggacaagagtttctcaattgtcctcatccagttttgcctttatagtgaatttcaataaatattaccatgcctatgtaagagggtgactggagaggcagaaattctatctgactgtccacttctaactctactattggaaaacctgctaggggtttttgtatttattatttttggaaaaatcattaagtggattcccttagctatataaacataaggcctgtcatctttttctttggagaaagagtgtgacaaaatttcccccttcttattaaaagctacccctcctcttggtacagtttgaggatagcgtggaccaaactacctaagaattcaggagtctaccaggagaaaagagactttctcactttgtcccacaattagaagtactgaggaaacccatgagaatggatgaaaaagggcagtcccatggtgtattgtcgggagagaatgctgatacggcgggccctagagggattaatgtatctgtgtagaggaaggggaaacctaagctgcctgctcaagaagagcatcttagattgttgagtgagggctgatctttactaaatgagttaaatcaaagagccgaactcttggagtccaaggctgggcatggagacccaaaccagcaaggacacaggtctggacaggaccattgttcactgtgataccacatggcagtggcagaagccttcataccaattgccgtcctctctacacctgaagtttagaagcacgactctgctttagactgaataatccctgaggttcttgggttatttgaaagaggggtagttttcaaaaagagagatattagatttcctattgaaagggcagccctggtctccagtgattaactggaaaaacaaaagagatataacaatttttacatctaagtactgtgctagcttctgtggatctagaatcaaatgagacaagatgtagtatgacaagcagttagactctcaagaaaatcattcaagtctgtttaggaaaactgacattcattcattcagcaaactattgagtagctcctgtgcatcagaacctgtattcacagtcaactgaaataaacacaatttctacacgagtggagttttccaaatagactaagatgtcataatggactgtgtgtagagtaatgttcaagttttttttgtttaagcttccccatcccccagaaaatactggatatatatagcaaaacctttcatggataataattgacatataccttggagaccatttggaatctccataaacgaaagaagaaagggcatttcagacaaagggaactacatgtacaaagtcacaggcatgtagaaaaagatgaatgtttcggagtaacttacagtatgtagggcgcaaacagaggaaacggcaaggaataagactatgtgagaaagcaagttagggcgaccttattaaaaagtttatagacagtggcgcaccgccaaagatgtagaaatgtggcttgctgtgttctgtattttggagcaatcactcgggtaccctgtgttgtgagtaggggtgaaagaagagaatcagtggaaccatgggaagcagtttgggagataggttggaaaaatattggaatgttctaagcatgacattgtgaaagaatgctagaatctttttcatatgaggggtgttatggaaaataaagaaagtattggccctgccctcaagaagcttggaacataaaagaagtaaaacatgagagcagggcctaataatgtatctcaaagtgctgaaggaagcatatgcattatagaagttctcatcctggactgtggtttgttgagaatgcagctgggtggagtctgaggaagtaagtgatggccataatcgaagaagagataagaggtaagagcaatggcttaaaagcaaaaaagcctcaaaacattcaaacttcctttgtataatagtggatgttattttgagaatgtcagtttcaggagataccataatcatgtgtttgtctgtatttaaaaagccaccaccataaaagatctagagtcactcatgaagttcaagtaccaatttttacccatgagtgtggaacattctgctcttttacaaacagtaactcgtactgtcacattttgcggcgcatctctcattttgttggttatttagtggccatgtaaacatgtacatgacttgtggtgaatatggtgattctcactttataaccaaagagggtggatgttacagcatatgagcagttatgactgtaaagcctgaagtgtgagtcacagggtctgacccaggtagtaagatgtgttatttgttcatgttggttagctgaatttcctgggctgacctcactgaagtttgctccagtaaagaaccggatctttactgatagatcaaggatctgaattctgcacctagttctttggctaaccagttgtgtcctttgggggaaatttcttaatctttctgctctccatttccctttctgtaagtaagggattagaccaaattccatccaggattgagaaattctatggtgtgacaaagactgctggtgctgactgaatatccttacagatttgttcatttagtaaccaatataataaagatgactgactgaatcttaattatattgggtgacatctgcctagtcaaaagattgcatttctcaggctttctaagagattgatgcagccaactacatgttagcagagggagctcctgcctagaagcactcacttttactcctcctcccgtttgtgtagtagtgatttggtgctggtgctggctggagcatcagtagccatcttgtaacctaaatggcagaattgagaatggaagccatgtgttacggatggtggatcagaaagataataggaacctaggtccctgataaacatggtgtcaccattccaaccttgacctgtttctagattattttctttacttttctttttcctttcctcttttttttttttttttttttttgagtctttctctgtcacccaggctggagtgtagtggtgtgatcagggcttactgcagccttagcctcctgcactcaagcaattctcccacttcagcctcacgagtagctggaaccacaggtgcatgccaccatacccagcaattttttttttttaattttttgtagagatgaggtctcactatgttacccaggctggtctcaaactcatgtactcaagtgatcctcttgccttggcttcccaaagtgctgggattaaaggcatgagccaacatgcccaggctacattttcttaatatgagataaaaataaacctctttcttattgaagccattactagatgcctaattcactttctaactaacatattagcatcagattatctttatgtaatttccattgctaggttttctctttgcagtattggagacaatagcttaccaactagcttgggaacttcttagtgctattagagtttcaacacaatttaccaaatttctaaaattatttagttattggatatatgaaaacataatcaccatatgtgaagaaaaaaccaccaatgtttagtacaaaaattgggagggggaatattatattagagaaagtttattaatccagaaaaccacagaatttaaaaaatattggaagttgggaatttgggagttaaaggtacatttgatctttggttaatggcaagttcacattttataataggatgtaaaaccctatttctcactgcacctgtactttgatcttcttgtctgtcattgcaatgtgattatgaggattactgggtcactctcagcctaagatgtttttgtgacttaattttctaggagaggaaggggatcattaaaggatatcattaaaaggagagacacaaggcttgtaattgaccttccttgaaagtagtcccatctggaagattttatcagtaaacatttatcagtgtatttggcttttaagcagactcttctcctcttgtctttgaaacaaacaggcaaaggctaaaaaggaacacgttagtgctcaaagtttgcttcttgtgcatgctgaatgggaagaaaaataatatttaagaaaaaagctttcttctaagttaattacatgattcttttttcagttttgcttcaatgtttctgtttgccaaattttaattggcaagttatggtgttcttcaatgattatgccttggtgtgatttgcttggatgtgtgtttagagagtggagggtagaagggatgagatttttgtgaaatacagtgagcaggggcttagaaaacctactgcagttctctgtgtgactaagcccagcactagtctgaaacttcgtattgtacttctctggaatgcaataactatcgtcaggaagacaaacgttgctgtggcttaaataaaataaactgacatgatgtattaccagtcaaaataaattacccaaacagtcttgtaaagttgtgttttttggtcatcagaactgcctcattattcatgtgtctgtttgtctctttggttagttttgcttgttgacttgcatgtatcaatgatcacaatccttgtcatttgccaattccatataaactttcagaaagtgaaaattgcttttaagaaatttattttgaagtttctacttatatttacccacataatgcccctcactgatagccagctttgtttcttccattcctttgagaatactccctagtgaatttaaagagtaaaatctgatgttgtggattataatattatacaccaataagtggttgttacacacttgtgtccacacttggtaagatgtccttgtggatgtatctcttctatgtatagtatattaatggctttatccgccatttaatgtggttcccatgaggtttaggtagaccatagatactgtttcaattagaacacttcatgaggatttagtttctctgtctatgggtcctgtatctgaactctccatttttattcttttgtttgttttttgttttgttttctccctgatgcctgatatcagaagaactctccatttttggcttcattctctgctctatccacatgagacagaccaatgtctgcaatctagtgccatacctttccaggttttttatgtccaacaaaaaaagagagcatctctttctagtagctcccacataattaagggtatagcccctctcctgaaccaatcagtcaatcacagtggtcccatctgaccatggggatgttccccaaaggaaatcagggtgttatttttcaaaaggaagaagaaataaatgctggaccttcataacaaccaattgcccactaaaagtgcagtcatatttcttgatgaaatagaacctctccttgtatactgggctccatgacacattgatcatggttagctagaagattctgaagtcttattatccactttgccagttacatttatttgtagctcaaggggactgttaagggaaaggggagcagtgctaaaaacaaatcccattccaatattattaaaaaaaccattgctctgcccttcctttattcacaacttagttcctcatcctcatcttccccagctcctccttttcagcaatttcctctgtaggtgcccctaccactaactcccacagattcccccatctcctttgaagaaaaaagctagatgctcccactccctttatttcttccacagtaaccagcttaactagcacacggctttgtacatggtacacagttaagtaatatttgtgaaataaatacggaacacttaagggaaataaaaagcaatctatcctcatcaagaatgagctgagaatccctgagatagcctatttagcagcttagcctgaattctgttttagtttctgtttctggaaactcttcttattttaagaaagaatgattcttataattatttcatatttgttgatattatccagtcttagccagttatcaaaatggtcttgagaattaggaggggaaagcataatgttataaacatttcagcatattgtgcaagtaaagtcctggtagtctgggtaattctagaactcgagtagacttgaagtgatatcagaggaaagctattacccaagtttactgcttgctaatcaggcagccagcaataatgagatggtacaatagaaatgttcaaagtaaggtttcttggcatacatagctatttaattattttatttctgaaagaactatagctccactgttacctaagtttaacctttaggcatttaatataatagtatctctagtgtaacagagggaatcaattactatgataaaccatatcctttgtaaaagaatactataataccaagaaaggcttttgtcttcatctttttagtttttggttattttttgttccattccctttaggtaagaataagcatctagaatgcctcattatgagattgttaatgaatattttccattgtaatttaataagcctaaaaataagaagatactcctctactttgtcatacaagatcgttgaatggtgggtcattagttgatagcaaaaagtcactcattcttagttatgtttctgatgacttgaaaaattgagtggcagtatacaaagtctgagcaaaactgacttcagaatgagtatttggctttgatttctcatggcatcttgcccattgagccatcttttcagaggtctcagctgtatgaaaaaatagtacttttttttttccagaaacatgaagtctggcaatctttataactttgtgcagcttgttgattcccggattcaatggtgttagtgaaaaagaagtctcaggagctccagagtctcagaagaatgacaagaagacccctaattcttgcctgtctctatatttagtatccaagttggggataaaagctagtttttaagattttctgttcagaaatcttttctatatactattcagaggcagccctttgtttaaacctttttttgtctcaggcatggattaactgcaattggattctatgttaaaaatgtatttttttgaacattttgtaggcatcactccagtattttctattggtgaaatcctgatctttttctgtgtagaaatttttgtgaccttcttttctttactgaagttcccacatttcatgatcaattgtcttggtctgcatttttatccattgccctgggcacgcaatagaccttttcactccagagatatgagtccttcagttctgaaatgtttgctcttattcattgataattttatgccctctattttctctgttctttcttccttgaattctcattatcttagttggatctcctagatcatatcctttaatttcttaattgttttcttccttttttgtctttttgttttttggtcttctagaagatttgttcacacacatttttattttccaaccttactattaaaatgtttattttggtcatgatttaaaaataatttagcactctcattctctcctttttttttttttttttttttttttttttgagacggagtcttgctctgtcaccaggctggagtgcagtggcataatcttggctcactgcaacctccgcctcccaggttcaagcaattctcctgcctcagcctcccgagtaactgggactacaggagcatgccaccacacccagctaatttttgtatttttagtagagatggggtttcaccatgttggccagggtgatctcgatctcttgacctcatgatccgcccacctcagcctcccaaagtgctgggattacaggcatgagccaacatgcccagcctcatcctctcctttttaatggtatatgttcttatgtcagaagtgtgttttatctaaggtcacagattattatcctcttgaggttttcctctgtctctctctttcctgtagatttctttcttcagttgatgtttgcttcttctagtttctcttcttcattatggagagtttccttaagaggctgttcattcttagttaaaagcaagacatatacaggtgcatatgcacacacacacaaaacaaagcaacaatgacaatgatggcaagaaacaatgtcagaagttctgtgatcatggatagggctcgtcaactgtagggttgcactgttgcatcataggttgttcaatcaaagccggtgtgttctttgaaatgtttccccaaggtcatgattagggggtaccccactttctgcctgcgagatttgcgcctggggcatataactgactgctaatgtctggggagcatgacaaataaaaaagttgggtttcttattgcaaactctataggctttcaaataagcacctatttcgcaacctgcagcctctcctagtttgctacagtgcctagtatcatcagtttcaaatctctctagccgatttcctccaaaaaagaaagactccgcttccagtaggtaagggaagtagttagtttggatccaaaggctccatataattttaatacactttcagcccctcgctaaactcctgccttccttaattctgctgcctccaagcagtaagtctttctggattcgggagaacacattagtccactttctcttggaatttactctccgtaaccatttcctcgattatgctaaggcacttcagctattttctgatttcaaaaaatcagtagaaatctctcctttgctgatcttgtttcctttattatttgtgcctttgtgggtgggtgtgttgtgtttttattcctttactttcacttcagtgaagtatcagtaaaagagaaagaagataagcaggcatgatttcaccctctcttactggaaatccaggggaacgatagctgaggaggaaagtagcttggaagagcaccttagagtagaaaaagacgggagaaggtgagtttacaaaagtacagcaagatgatgatgatgataaataaaactcaatgcgtgctcactatgtatttgcactgtgcaaagttctttacatggattatttatttgtgtttttgtaagaacacctcaggaagtagctattgagacacagagaagtaatatgacttgtttaggttagtaaatggtagaggtggtattcaaattcagatctgatttcagagaccatcctctcaactgccacactatcttgcctcctacaaattgcttaagcagggatttaaaatgaaaccgtacttttacaaaaatcatttttcatgtccattatttaggagtctctctactctatcaaaagtattaattgacctatttattaatatcttagtaatgtaaaatgcttttaggtttgcaaattagtaagagaaacttcttcagattaatagatgctgtctttatgaggactgcatgagacttatgtactcatcattatatacacccacagacgatctatttgaattctgtactcttactcttttgttaaataaatgtactctttctaactatgttttaaatcatctgcaaagagatggaagctgtgtgtatacaacagcaaacatctggaagaaaagaatattcagccaaagcttgttaaagagattcataagcaaagtatgcctttgaattatgaaaatgaattcatgtccaacatcataaagaactctgacatgtctgtttatgtttcaaacatggcttagagatcactgagattaaaattcaattaagtgtgctctgttgtctttgctgtcaatttcagttaaaccagacttgtttggcagttttggggagaaaaatcttcagtgttttaccttgctaacattttaccatttggactttgtgttttttcccaataaatgcatgtcatttaaggagatgcttcatgttatacacacctggtgattttcatcagcagttgtacagatgaaagagaagtaaaagcccccaaataattcatcttttaggctttgtaaaattatcattttataaatttttaaattgtgaaatataacaaaatttaagaaagtatgtaaaatttaaattttaagtttaacaaattgttctaaagtaaatacctactatgatcacccctcagaaagaccctataatttcctgtttcatcctctccagataggtcaccactatcttgactttacttttacttttcctacttttctttatgatttaccacgtatgtatgcatgccaaaacaacagttcaatttagtttgttttgcattttatgtaaatggactcatcttgtagatactcctgtgttttgctccttttgtgcaatattatagttgtaaaattcatcaatgttgtatgtagctgaggattgcacatcataatatatatcatgatatatagcattctgttgtataaaggaaccacaatttactgtccaatcttctttctttatgcagttgaacatatccagtttggaaatattatgaataaagatatttcgaacacttatgtgcgtgtatcttgatgcacataagcgtacatttttgtgggggaatatacctaggagtggattcatgggtcatgcatatctttaacttcagcagataagcagaaagcatttgacaaagtggttgagaaggtaatgagaattcctgttgctccacgttctaataaaaaacacttggattttctttcttttttttcaaatgacagggctctataatgggatcattgcatttctctgattactaatgagagtgagtactccttcatatgtttagtagatatttgaattgtatttgtttttgttgttgttgtagctcttcatgaaaagtactttctaaacagcatttctgagcaccctttagggagccaaaggccaaataagttagagtatttgtcacaacatggcaataagagaggcgaattcatccattaattgcttgccatatgcttatcactggaatatattttgcagcatctcctgacatcactatttatcccttttaccaaaaaaaaaaaaaaaaaaaagaaaaagaaaaaaaaaacatggctactgataatacttgggagcactcaacgaaggtcccgtctgagactctgtagaatatattatagaatgcaaatattctttggattccgtcttgttgttgttgttgctgtttcctaccctacaacttttggcatctctacccaacatttttataatacaggactgtctctgaggtttgttttccttatggttgttctcatgtataaaagagatgatgatagcgtttctcatgccagtatgtctgtgtatgatttatgttgtaaacagtgcaaagagctttacagccattgtctcactaatcttcagagcatcttttcgaaatagagaggagacaagtgaatcaacatcctctatatcacgggaggaaacatatctccctgtggagagatgtccactgctttatcgacaaggcacaaagctgcgaacagaattcaggttgtattctgactcctacactaatgcctatggactagacatggtgtaaaattttatatgcgtgaaacatgaggtgtattcatcaactgatcactattagcaactggctagaacatgaagtgtttgtttgtttttcaaaagaaagatatgatgaaactttatatgcttttacacagttctgatattttaacaatttgactaatttttatagttttattccttccagaaattcctttaactgtgcttatcccgtaagtaattgctaatgttcttaaactaatcgagaaaatcatttctattagtccctaaatacccagacttcataccttcttgcttcccactctcctcatatctaatctctcccttaggtttagcaacaaaatgtgcagcttgacgtggtcagtgggtgtctgaacatttagtgctagtgtttcctctcatctctctgcttttatttggacttctcaactcttaaaagtaattttaacatattataagaaatctttgaatttataacactttacagtttatgaaagactatataaaggttccttctcacaggctgtaaggggtacaaggacaatgaaactcagatgacatccttaaatgcactctactattatatggctaatttaagattaaaaatctggtttcataattattagtctagtggtccttttataggcagcataatacagttgtaaggagtacagactgcctgtttttgaatcactggtccatgctaactagctggcttaccttgggcaagttacttgaggttctctgtgcctcagtttccccagctatcaaatagatctaagagttgtgaaaattcaatgagttgatacatataaaaatacttaaagcagtgcctgtccaacataaatgcttaataaatgttagccctattatctttcctcattatttagtgttaaagagcaagaacatctataaaaataaaaatcaaataatccttcaaaaattcctgaatattataaaactaacatataatgtcaactaaaattgataccaattagtttccttatcttaatgaaatcagtattgtagtcagagccaagctactgacctggattcacatataacattcagtttctcttctgaaactccagctcacttagcacatttatgccaaaaacaacaacaacaacaacaacaaaaatgtataaattgcctcatttgtttgaagtgtaacactcaggttttccatacagcaggaaactctgatagaagtatagattaataggcaaggcattgctccattccctaaaggcgtaataaggctattccacaaatatgtattgaacttctacacaggtttaagaattatgaggaggagagaagatattgtaatgaatccctactattctgtttattttttatttctttttaacttttaagttcaggggtacatgtacagatttgttacataggtaaacttgtgtcatggggtttgtagtacagattatttcatcacccacatattacacctaatacccattagttgattttcctgatcctctcactcctcccaccctccaccctctgataggtcacagtgtctgttgtttccctctatgtgtccatgagttgtcatcatttagctcccacttacaagtgagaacatgcagttcctgtgttagtttgctaaggatattggcctccagctccatcagtgttcctggaaaggacactatctcattcttttttatggcttcatagtattccatggtgtttatgtaccacatttgctttatcctgtctactactgttgggcatttaggttgattctatgtctttgctattgttaatgctgctgtaatgaacatacacatgcatgtgtctttataatagaatgatttatattcctttgggcatatacccagaaatgagattgctgggttgaatgctagttctgtttttaggtctttgaggaattgccacactgtcttccacaatggttgaactaatttacactcccatcaacagtgtataagtgttcctctgagtacctgttattcctttgaagaaaatacctacacaactagataattagagaaggagagaaagagaaagagagagaaggatggcacaataataaagtgttttttggaggcaaggatgatgttttatgaatttttgtattcccagaaaataacagataagtggttattagtgaatgaagaaatgaatgagttaactaattgtagcagaaaagggaaagataaatataaataaaggtcatccatctatttaacaaacatgtattgcatgcctaggaattgtacttggcttgaagactttaaagtagattaagacagtcccagacttcaaggaccagcaactgagggtgttaaacagaaaggacaatgacattacaacaagctgtgggttcacacataccatttcaagactagagaagagaagaaaatcagagattcttccagaaatgaaaattcttgagctggggctttgaggatgaggagaagttagttagttagaaaggaaagatgagtaaggttgggggtcaatagttcgagcaaatattgcagtatgaaaggtgtgagagagcctcaaacaggttacagattgtggcactataggtgatggggaaggagtgagagaggtaactacagagaagtaacctattaggaactgctaagaaatgttagatattatgctaaaaagcttggaatattttttaaagcatgggggcatcacttgatgatctttctcaaggacaggactattaatcttagggtttattatattcttcaattttgacacaatttatacttcaataattctctgtaagaatttttttcctttgtggtcttatttatttattgagatagggtcttgctctgtcacccaggctggagagcagtggcaatcatggctcattgcagccttgacctcccaggctcaaacgatcctcctgcctcagcctcccaagtagctgggactataagcacgcaccactgtgcctggctaatttttaaaaatttttgtagagacaaggtctccctatgttttcttggctggtctcgaactcctggtctcaagcaatcatcccacctcggcctcccaaagtgctgggatgacaggtgggagtcaccacatctggccttatttttttaacgtattttttaaaaacccaagaacaggcattttctgcgtaatgtgcctgcattttggctttgtatttactaatgcttgaattattgccttagctatacataatcaactgaagaaaagtatttaacttttagctacagtgatttctcatatggaaactgtatacttctcagggattgtggaaatgtccttggaagtctatgacccctcaaatttgagaaatgttgatgtggaggtagaattggagtaggcaggggaaagacaggtaccaggaaaaccagttcagagcctactacaataatcatatgagaaacaaagagggcttgaactaagggagttcagatgaaagaagaatctaatagttatttatagagtaaaatagacagaacttggtgacttccaggattttaggcttgagagagggaggactcaagaattgtacatgggtttctggtttcagtgattagatttctggcatctgctgtccataagatagtaaaaactgcagatagggtaaatgccagtattggaaatatgaagtttgaggtgtctgtgcacatccagatagaaatttatggaatgtggaagagcaatgtaagctggggttttcagcacaatggtaggtaggtattgtagttttgggggtgaaggtactcacacaggcaatgagtagactaaaaaaagaaaaatatagagaaagaagaatccaacaaagagattgagaagtagtggctgagaagtaggcagaaatttaggagagtggtgttctcaactccaaggtaggagagaattccaagattggaattgttagaaaaatttgatggagaaggtattctttgaactgtgtgtgaatagacaaagagctctgacagagcagaaaggaggaggtatggattctgggtgaggaaatgttataagcagtcccacaaagagtgacatcagatttatacaagaagccagagcttgactgtagtgggcagtacagcatagggtggaaagcatagactctgaaaccaactccttaggttcaaatctcagctctccacttttagctatgtgacccttggcaggttatgtaaccttctaaagcctcgattttctcctgtgtaaagtggaggcagtgatagtacattgttaatagattgtttactttttactcttctgtatagacggaccccttgcaaaagtcagggtgattttatatatacaacattgttatcagctacctctgaatacttgattcttttccttctacaaccccaacctccatttgaaaagttctcattattctttttcttacctattctaaaagtatcactcagtccccacttcctccagggagcttttttgacgagtattcagctcttacttcttagacctccagtaacatctaatgtttgtcaagtacaattaagcacttgcttttacaaaactaattgtgggagattatttctaatggtttcatgttttttaatcttctatccccaagaaagattgtaaacttcttaaagtcaagatacatctccagggtatccgcacattttgccgtgcctgggacactcagtttatgcccattgtcctgatatagtttatatgaattcataatttatagtgtccacttttgactctctcaagagggtagttgtttgcatgataaattccatgaacaacctggatataataatacatactttttgaaattagtaacaaatatttattgagtggctatagcatatctattacaaaataataataagcaagggggagaaaacgaactgtcaataattatgccattgagagataatttttctgtctctgtgtgtgagagtgtgtatgtagagagagaaggagttttactaacaacaatgagattatactgaaggtaatattttataatctgcttttaaaatttcacagtatattgcatcatgaacacttttcttaccattaaatacaattctctatataacattttaatggcatttccttacatgaatatactacacttaagcaattttctattattaaatatttgaagctctccccagatttcacattataagcactattgtgatgaatatctttgtgtagagtctttatagcaaggctgggttgttttcttactatatatttctagaattagaattgtcaaactaaagaattgcccaatattttaaagatttatttttgctattattgtcatattgccctgcagaaagtttatatatacttcatcagcagtctctatttctacattatttccgttgctatattttatcattttaattgttctctttatttgatgaatcacatagtattttgttttaataagaattaatttagcttcaagaatattaaaatctgttttgtgtgtctaatggcaattatacatatttgctttttattattttattatttattcgtgggctgatttgttttttcttgttgattttatttttatttattttttaggagacaggtgtctcactttgttgcccaggctggtctcaaactcctggactcaagtgatctgactgcctctgcctctcgaagtgctgggattacaggtgtgagccaccacccctggcctcttattgattttagagtgttctttagagattaagaatattaacttttcatttatgtttgttttttacacttttttgccatttattcatttctatttttacttttacagatactctattttaataaatagaagtttaaatagtccctatgtagcctgtatgtttatattgtttatatagtctctatataaatatattttataaatccttagcaattcttttccaacaccaatattttcttctagtatttaatcattttacatcatatatttatatctctaataattatggaatttattttactttatttcagggctctgatgttcttttcctagattttctaaattgtcagaatcctaggtattacataatctattatttccttattggcttgaaatgccacttctactgtttatggttagttccttttttaatctttacatcctatttctagacaaaaagccccatgttataattattatggattttaagaaatacattttaatatctgggagaacatattccctcttaatcttattttttagaatttcctgggttattctcacatcgttgtgctaaattatacaaacaatctacttgtcaagtcccccccaaaaaaacccattaagattttgattgaaattgcattaagttgcttataagcagtttataagtactacagagctccttatgatatccctgccaactacttaagaaactcctagttcttaaattacaaatattcccagtcaagaaaggatcaccagacatttgaaaaaagacaaaaaaccaaaccaaacaaaaaaaccagtagcctaaacaaaaaggaactaataaataaacaggacaaatttattttcctgagacaatttatcttctgctttccagaagaaacagagacaatgaaaagtgtgggaaaaatttgtcaatattaaattttcagagatattcagggggagaatataaccattaagtatgatctgatttccataaatagcagaatactgaatatatatgtatatataaagattggataaaatgcaattcaagtaatattcattcttgaatattgaattaagcaaatatcttagaatatagagcaaaaagccaaggatataaaatatgatggaaaagtaaaaaagatatgaagaatgtggtagaagtggaggaatgggaaaggatgtgggaaaataacagaaaaaaaatccttgacctgaagagtaattcaagtcctcagattgaaaagtttcatccaacaccgaacaaggaaaaaaggatacatatctagatgtgtatacacatgctgatgaaaattttggaattctaagtataagaaattaatccttccagagaacaaaaaaaaaggatctttcaaaggtatcaaacttctcatcagcaagattagaagtgaatgcagactaggcaaggtttcaaagttctcaggaagaagaactagaacccaaaattgatagtcaaactatcaagtgttaagacaaactaaagatgtatttaaacatggaaggactcaagtttacaactttacctcctacagattcttcctaattaaaaggaagtattactcgaagatatattcaagcaaaacaaagcaacgggaatcctatacagaaaacctaggatacaaagagcattggaaccaacccagatgtttatgaaaataaatcccagtatgacaactgtgtagtagtaggcctagaaagcaggcagcctaagttagagtcatcagaaggttccaggaaaaatgctttcaagaagaaagtagacatcacatttcgaattgcataattaagagccttttaacattttagggcaaaagtaactgcatttaactcatagattaatctaagacttgatatctttataatattgactcttcccatgtaggaaactagatatattcttcaagtttttaaaaatgtccttcagtgatgttttgcaataatatttatacaagagttttacatttttcgttgtttatttatacatatttgatatgttttattactattatgaataggatcatttatctattttctaactggtatatagaaaaaaacctgttgtggatacatgctttataatgtttgacctttcttataaatcataatggtctaccttttttatacctttcagttgattctcctgaattttgagttacagaatttttatcttaaaatagaatgatttccttctctcttaaaaatatttgtacagcatatttggttttcttgtttggttgcttacgttagaattttctgagcaacattcagtaatagtggagacagcttctttttgtttctgatttcattgttaattatagatgtcgaagaaaagctattcattaccatgaaaaggaactattctattcttattgtactgagagtgctattttactatcaactctttaataagtgtgatatactactgtattaggccattctcatgctgctgtgaagaaataccctagactgggtaatttataaagaaaagaggtttaattgactcacagttctgcatggctggggagacctcaggaaacttataatcatggcagaatgcacctctttacagggcagcaggagagagtaagcaccagcagggaaaattccagaagcttatataaccatcagatcttgtgaaactcattcattatcatgagaacagcatgggggaaactgccctatgattcaattatcttcacccagtccctcccgcaacacatggggattatggggattacaattcaagatgagattttggttagggcatggccaaaccatataatctacattaaggacattgttaagtggcaggataaatggtgtgggctcaactttatactatagaggaccattatagcaatatcataaaagtaatactttgagagactaagccaataataggacaaatataaatttgaggaaaagatatacaaaaccatttagtaattcaagcatctagtgataattgtataaccatatggacaaaggtagagaaaaatacctatagaaagtttgaacttaagagataggtcaggtaacaaacccactttttttcttttttttttttacctgattacttcctggtcatgaggttcaaaatatttgatagcaaaatgatttaaagtccaaattaatattgaattgaatatacacattacagccaaaaccagacctatttttctgttgcttatcatatataattatagaaagcataactgaacaacaggaagttattacttcttaaatatcagaaaacatttgactttctcttctgaaataaggaacggcagtaaccgaattctagttactgctcttaatagttttgtagttctcataaaatattgcttatatattatttggctcccacactatccattttgatggttttaaatttttcaaataaaaataaatgagttttcatactatggatgacttgacatcagttaaaagtgtaaattcatacttgaagatagcaggactctatgctctttcctcattgttctggtcaaatacatttccaatcatgataatcaataatgtgactattaatttttacttgaagttaatctattcatgtttgattagaagtgtctaaaacataaacttgggatgtcaatgaagaactttttaaaattctcctccacaatggctgataatcaggccatgattatattttgaagattttacctagttagtcatatttggggtaagaatatatgctatctccttcatattaatagttcagatctttaattataacatgtttcatggtctataagattaaattgaacattaggaaagcttagcatttctcatttgtgagtcttacattcacacctgtcaggattggtacagattcaagcttgtttttaataaacttcaaagaagatcaaaactagggatcatctgtttcatgtctttgacgtgatagaagtttggggcccccgttttgccctgtagcttttgcctaaggagaaagccacccttttcagctgatacttgctcccacaggtttttcacaatttttgagtagcgagtggcaagaagcaatatgacgatgttggtaggtagagagatacttcttcaccatctggtgagcattctggagaacagagacaagtcccacactgttaaaggagtgaagtcattttgcagccagttttaaggattgatttaagaactctaggagcaggccattatgtagtcatccattcagcacgattcttcgtgggactgtttacactagaaggaactgtagtgatcaatttagcgttgaggaaactgagggctacagagtgccagggtcacgttcatcacacttatttgtgtttcaaagcagaatccacactccaaaatgtgcaactactgtcttactatggaatttacactgacacattctgaggtcaggcaggaaatagaccagagtaaagcattagcaattaggtcagtagcttgagataatgcaggctctgaggcaatcttcactttcactgaccacagactgggattgggaacatgggaaacgtgtgtgtgtacagacacagcaacccttttctatgtgtcatgtcttcagctgagttttaagttgtactagtggaagccatagcctatgttggctcataggtcctagtgccctttccccttcccttgcctctgcccctgcccctttccttgccttgcccctgcccctgcccattccccttctcctctcctctcctctcctctcctctcctctcccctcctctcccctcctttcctttcctttccttgacactgggtagagtgtaatgcaatcatagcttactgcagccttgaacttccagggctcaaccagtcctcctgcctcagcctctgggtagcaaggacaataggcacacaccattatgcccagcttattattattattattattattattaattttgtagagatgggtcctgctatgttgcccaggctggtctcaaactcctggcctcaagcaattctctggcctcagtcatgcaaagtgtagggattacaggcatgagccatctcttccagctctagtgctatctctttataggaatcaaaaatttgttttggctatttcaaattttgtagagtaagaggtcaattagaaaagactcagttatgttttcaaaaatgcactgtgtgcatatgtgtgtagaaatgtattagaatgaaataacatttttttacagtggctaccattggtttgtgaaattatgcatgctttttcttaattttctctaatttttctctatttcctaagatttctaccatgagatttttctcttaatgtctagttttattacataggtaatagataaatatattcatgtcataaaatatttttaaaattcagaatatgagaaagtcctttttcatgctccttagtcttgctgtctttcttgaaagtatccacttagtgatggatacaatatggtgtatatctgccttaatccattttgtgctgctctaacagaatacttgagactaggtaatttatcatgagctgaaatttattggctcacagttctggaggctgggaaatctaaaatcaaggtgctggcatctgttaagggtccttttgttgcatcaccacatggcagaaagcaaaagggagagagatagacagattgggagagagagaggaaaggggaccaaacgtctcactcttttataacaaacctgctccagtgataacaggattaacccttacatcagggcaaagctcacatgacctaacacctcttagaagtcccaactcttgctggatgtggtggctcacacctgtaatctcagcactttgggaggctgaggtgggtggatcacttgaggtaaggagttcgagaccaacctgcctgagcaacatgaagaaaccctatcaatacaaaaaaatacaacaaaatagctgggcatggtggcatgtgcctgtagttccagctactctggaagctgaggtgggagaatcacctgagcttgggaagctgaggccacagtgagctatgatcatgccactgcactctaacctgggtgttgaagtgagaccctgtcaccaaaaaaaaaaaaaaaagagtcctacctcttaatactgttacaatggcaattaaacttcagcctgagttttggatggaacaaacattcaaaccatagcagtatcttttcagaatttttaactgaatatttatatatatgaacatttagaattaggggtaatttttaaaaatcaaaagtgatatactacagatgttattctgtgattgatctttgcacttactatgttttggagattattttattttagtacgtataaatctataccagttttcttaaattgcagcatagtatgtatatcaagtttatcctttaactattttcttactgatggccttttttaatattgcaaaccatactacactaaacattgtcgtgcatacttccttgtgtattacattggtttttaaatcaatgaactagttgtaaacatggagagaaacaacaaggagggagatggatataagagaagaagagattaaaggggatggaatcagttgtttctggagcacagaatattcaccaaatttgaccagatgcgcggttgctcatttaggaaagagcaactgcactgggatgaagaggttttttaggaaatcagaggtcttcagagaagttttggttaaaatctgcagtatacactaccaaaatggtttttgtctttgttgttcttatgcaagaaagactagctctttttatctagagctggaaggttgctgtcttggagtgggggagaaaggagacaagtatctgatgggtgggaatggaaggtgtgtatccttgcagcagacctccagagtagctgactgactgatatgcatggtagtcctaagatgtgtttgagaaaagaaaatattaggagctcttgacaaatcttgaaaatcaatacaaaaattagccaggcgtggtggcgtgtgcctgcagtcccagctactcagggggctgatgcagagaatccctagaacctgagaggcagaggttgcagcgagatcgcaccactgcactccagtctgggcaacagagtgagactctgtctcaaaaaaaaaaaaaaaaagaagaaaaaaaaaatcagttgcccatcctgcagatatacagtatagtgtaactgcttcagccgcttgcaaatctcttttacaattcaaaacaaattatggagaaataagagtgaaatattttcctggaaaaataatgtgaaaaattgaagttttaaatatcatagttaaattgaatgtaccttagggacaactcctttatttaaaactccaattctccaataacacacctaatatttgttattttgttgttaaatatttactctatgtagacattatgctaagagtataatgcctttttaatattcagaagagcactctaaaagctattacagctttacagacaagaaacttgagaccagagagaggttaagtaacttgaccaattgtcatatagcatttaagtggcagagttaggatttgaacccaagtttttatgtatttaaaattctggctattaacaccacactgcaaagaaacttatttagtagataacaagttatatccatatatttttagatatcaatatatatgttgtggatcggtagcttggggcacattactgctttgaattgtggtatcttttattagatattgaaatactggattattgataagaccatgtagcagtgagaaaaatagtttttgctttgatttgtgtcagttatactatgttgttggagcttttgaagtagggagtgatcaggtagagacaggcagaagagattagtttgtatgtgttatcctgaaatctgagttatttgacatttttaaggcaaggcattgattgagttttatgaagataaattggcaaagaaaagtaatcccatctgctcaataacaattctttgcttttagccaagaaaattgatttcaacttgagagtaataatcatatttatcacacttgttaattgcatgaactgtatacaaattgtcaggcttattaaggtagatatttacggtcactgggcgttcctcacattccacattttcattgttatggcattaactattttttctgtttctctctttgtcactgaagacttcacgtagtataatagccagtattttctgtgattatatagcaatattctcaaacctaattgttcatacaaagtacaaatcagggactttttctactaggttctgaagtacttgttctctagatttaaactccagtgttgtactaatgggagtaagtttttcttttatctgccaaggagctcctcttacatgtaaaaaactgttgtttttcctctttgtaaatatcagtgtaaagtacacactgtataaaatgtaaattactgatgtgagagtggccattttattcacattgttcaatgccaaagtgggccaaaggattctggctcattaactttaaggaaactatagtattcttttgtctctttagccttccttctggtttattcaaagaattctcatcaggttgatcaagagttgaaaagtaaagcactgttcttaaaaactgctctctagaaagatctgcaatggttttgaggactgccaagcaacaggaggtagaaaaatggataactaaataacctcatttacagaaaatatgttaggttaaattgcataggaaaagatagtatgggtctttaaaaaaaatggatatttataacaaagaaaggataaaattaataagtaagttataaggaatatttagaaaaataaaaacagtattctaaaagacaatacttatatctttctaatgtaaatcttagaaaatggtgagaatttcttgtatgctttatatttataagaagtaataatagcttttgaaataattccatattataagaagtcttttcttcatatgtacccaattccaaataagtggatgctggaagaaaatctgtaatttattttatttaaaagaaatgcagtatattaataaatacctattttttggataataaaataagcaacattttccagaatgaggtttttttttgcaacaaatgtgcataccaatgatttgaagtatttaaaagaaacttttctacttgaaaggaaccaagatgactaagtactaattttgcggaatctccaattgggaggatatctactgctcagaaaagcaaactaaaacaagacaagaaattaaaattgacaaaggagaagttccatataatctaattcaaaatcaaatgagtttttcaaagaaataagtttcatcatgtaatctaagccaaaatgagctgaaaatttacacacaatttcttttctttttctttttctctatttcccattaggtggtttccatccatggaaactagttacatggcattcctaccatcccatgcccatggtagacataattaagaaattgtgtgtgtgtgtgtgtgtgtgtgtgtgtgtgtgtgtgtgtgtgtgtgttttgtaagctttttactccttctcaacaaagcatttcaaggagccaacagcaaattagaattgaaactccattatgtctctcaggtcttctgatcagctcttattatacttactcttagtaaaataatctctattaatagtgagaagtaaggaactatatgatataataaaaagtgctctaaaggaagtcagaacattgtgtggaagtcctggttccaccattaatggtaaactctttgaggacttccaatttctccaggactggttttcaatctgtataattaaggggtttaggctagactctctttttattttttgaaacagtgtctcactctgtcacccaggctggaatgaagtggtacgatcttggctcactacaacctctgcctccctaggttgaagcaatccttccacctcagccacctaagtagctgggattacaggcatgcaccaccacgcctagttatgttttcgtattttagtagagatgaggtttcaccatgttggccaggctggtctggaactcctggcctcaagcaatctgcctgcctcggcctcccaaagtgctaggattacaggtgtgagccaccacacctggcctagacgctttctaaaattcttttcagtttcaaccttctatggcttttggattcttttatttcttatactttcatattactgaatctcataactcactttttcctccattttatattttcaacttttctagtctagggctctgcacaagttattactctgcccttttattactactccaaggtaattcatgttatatgtagatgtatattagccatgacaataaatctacatactgtattatcatctttccagaatttttcaaaacagaaagtctttcttgactaatcatttattccccatataatagtatgaagttattaacaaacgttccttgaattatgtgtgacagaatttgctgggagcttgaatcagtatatttgtttaggctgcatataacagaaggcttcatttaaaatagcttaaataataagagatttattgaattatataataagaaggtagtgatagaatgattctagtagtacaaacatgcatcaagaatccagattctttccttctttctagtcacccatcctcagcacagtagtttttgatctcagttttatcctcttatggtctcaagatgactacagcagctctaagtatatttatacaacttccttttcttctgtcactttttaagaaagataaaaactttaccagaagttccttaacagatttctttctcagatctgtattagaaacaaattcatcatatgcttatatctaagccattcattggcaagagaaatgctatgaaattggctgggaagtaatcatggttcatcctggtcctgggaggggcctgatctcccttgaagcaccaaccgcctgacacctgaacaaattctagtggctgctgggtagggaacaacagtgtctttacaagttggtgcattataaatacatttccataatttgaatcaagcctaccatctcctcctcatctccaaccacccgccccccccgccccccactttattttctgtatcttcagcaacttccagaaacttctcattcttccttaaatacacatttttgtacctgccatattttgcatgccctcttttatcagcctggaatgcactttgtcacctttgcagcctggtaaaaccatcattgtgctcatatttcaagaaccacctcaaatgtctgctctttagatctgaacccttcctgaattccccagcttagcaggtcaagtgagttgttctcagctttgtacttctgctatagatcagccctcatcattttataactatgtattgacccatttactcctgagaatcctgtaaggatgggactcagttccttggtattttgttctcagagagatgatgcttcatacttaccaactgttcaataaagtttgttgaattaatatagttaaaagcagatacctttctgttataagttcaaagcctagtgattgaagatttttctttacattatttaaatgtatttattttggtaaaatatttagagcaagtttcattccatctgttccatctaagcgattcatgacctgcatacattctaaatgacaggaaccacaagcaactcagtcagcaggcttcagaatcggtcatcctaaaagatattgcaggtcaatggctaatacactaacaaagaaagagcttatgcaaataagtaaggaaaatactgtttcaatgttaaatcattaaagacaaattcagactactcacaaagaagatctataaatgccaagttagaatagtaaaacagaaaacaaaaaaacaacatgaagacctctgattacatctatagtaattaacatatccatttaactcctctgccttcagaaaaccatcaatggatgtttataggcataaatgacaaggacaaagaaagtgggaagggagataacagcaacaaaattttggaagctgaaaaacaagtatacaaggggtatacttcctgatgaatgtaaaaccgtccctagacaaggggggcctaggcaggttgaagactgagtgccattctgaaaacagagggattaaataaacacttatatatttgtgttcatgataacacaaggctttttaaattctgtttaccactgtgtctccggtggctagaatagaggctgccaaatatagatgctcaaatatttgttgaatgaattccgaaggttgaaagtcccaaccttcttcccctagtcagcttccaactatgcttaagccttctggacaggagattgatataacctttggagaattcaccaacccaagagaaaaaacccaaagataatggtgcaaggtatttctgaatgaaactgttcagttggatcatcaaaaagtggatgtagttgacaaatcttacctatgcaaacagagcttccaatctgatttttagtactctagccttaaatatgagtagacagataagatttatcaaatacttagaaaaagtaagtgaaagaaaccaaaacaaatggaaaaagaccaacttcaaagtacagatgttggccgggcgcggtggctcacgcctgtaatcccaacacttcgggaggccaaggcggggggattaccttaggtcaggagttcgagaccagcctggccaatatggtgaaaccccgtctctactaaaaatataaaaaaattagctgggcgtggtagtaggcaactgtaatcccagctactcaggaggctgaggcaggagaattgcttgaacccaggagatggaggttgcagtgagccaacatggtcccactgcactccagcctgggtgacagagtgagactccatctcaaaaaaaaaaaaaaaaaaaaagaagagaaataaaaaagtacagatgttgcaggaagaaggtatcatcagagagaggagaagaaatacacttgatattgtattcataaatattaacattgcttccacgaaacaaaagcagatgctatggaaaaaaaaaaaaaacaactcagagaataggaaaagagctcttggaaagtaaaaacatgatagaataagttaaaaactcaatagaagggttgaaaggtaaattgaggacatctctatggaaatggagcaaaaatacaaaaaggtagaaaatacagaagaaaaagtgggaaatcagaggaccagttcaggaaatctaacatctaaaatcagaaattctagaaaaaagagaaaactgcaggaggacaaaattgaagaaaaatttccagaactcattaattggagcatttagcacaatataaagtattaaaaaagagacttgtgacttgttctaaggatcattatcgtatcgtatagaaggatcaaaaatcaaaagggcatcagacttctgaagattcgttttgaaacctagaaaagaatgaagtgatgccttttaaattccgaaggaaagtgattctcaaccaagaattctatactcaaccaaactattgatcaagagtgagcatggaataaagattatttctgaggtgcgagcctttaaaaaatgtatctctgatgcatactgactcaggaagctactggaaaacgtgctcaccaaaacaagggaataaactctaaaaacattacccttgggataataaggaaagaacatcccaaagtgacagctgagcaagagacatggagaataaccaatccaggtcaaagaggcctctggatgagatttcttcaagaagatgaatttaataaaattcttgatgtgtttgagccatacttagatttttgtaatatgggaaaagtttgggattgaattagtgataagtatatatggacatctaagggaacaaagaaactaacaaaagacaagaattttcaagaaggaaaacaaagaaaaaaaggtaatcagggtatgttacatagtttagctgcttatagtttttctttggttctgctcatggaaacacaatgactatcaatctaagtaagactataatatattagaaggatgggtgatgagaagtgtgaagtgttgcaaaggtaaatccttatcttccgctatgaagtatcaataagcaatgcccaaaaaaatgaactattaagaagtaactgtaaagttatatcatttagagatagagtggagtatagcaaatgaatcagctaaaatatttgaaaatgggtaccctctggggagtggaagatacatgtatgtattgtgggtgggggatgcactgcaggagatctctttttttaatccttgtggtactacttagttctctaaactatttgcatctataactttgctaaaaataacatttaaatttaaaaattgatcactcttgtaataagttcaaattgaaacaaggagataacatagttgctaagttttatttttggacatatttataacattgtatatgtgttagtgagaataccatgtaacatcactctcaagcagtacttctaaaagtagaaattgctgtaatatttctcaaaaactatctggcaatacacattaagaggtataaaaatgtttattccttctgacttagtacttctgcttcagaaatctcttacagtgatctaccttctagaaagactggagataaatacatcaaaatgttcacagtagttgtctctgagtggtagaattatgggtaaaaaaaagatggcttgtttccatttttcttttgcacccctctgcattttttccaaataatctataatgaagacaggctccttttatatttggaaataatttccaaatataaacattttaattttataacattttaaatttttcaaaacactggtcctcataacaagaaaagttatttgttgcaaccacagtagaccaggttaatggtgccaagagtggaatgcggataaaggctgacaaggccatctggaactgtgagtcattcagagcatcacagaagagagattttctgcaagtactagctgtgttgactgtgactgctgttttcctggttgctcaggaatcacccagggaaggagagggcttccccacgggattagggaaaaaaaaaaaaaagcttcttgttccataagagagtctacagataggatgagtaataagggatagattttactaaggtagaacaaaatgttaggacgctggtacgagcaccactgaaatatccctatatcaagttttagtcttttcattgcatcttctgaacctgctggagatgctttcacatggaacgtatttgctataaacttttctttatcttttgttcaatgctgtgaagtttgctaatcttaatgaaccaagtctcttcatgctgacaactcattgtaaaagaggtaaaactgtgtttccatggtatggggaatggagaggtataaggaggaagatggatttaaattgatttttggaatgcttgctttattttatcagttaaagaaaaggtctaacggattatttagataactttaggctccaactgcactgatctgtttgtcattcctttaagaaaccattttgattctgactacttgaatttgcacattttgttccttctctctggaataccctaacaaattctttctgcctgataaactacttactcttccaggtcaagttgaaatgttcccttcagtgtgaaaactttcatgactcaaaaaataacaattataataattacaatttgatgagctacctggctgtttacctaattctcacaccattagatgagcgaggtagttttaggctaactttaaaaaggaggaaactgagacttacaagacttgggtatgtggcccaagagtacatagctagatttgaaacccaagtccaaacccaggacttcctgcttaaagccccttctttttcaaaaactacattacctattgattattttgctttacatgtgcttacatgttgatcttcctcagtggactgccttcattccttaataggaaataaattgtcttttttggaggtgttacatttttgcatataacattaataagattaaaattttcatttgttgttgacattctttgcttgactctacactccacgggataggatccttgggcatagaaaccacgaatgctttgctcatcactgaatccagcatctgtcagtgtctgccatataggaattgctcaatatacatttttgagtaaataactgaactaacaaatgagtgaacaaaagaacaaatgaataaaaaacctcagatctagcccctaacaaaaaatacttaaaaaaaagttttagtgtctcaattgtctgtatagacaatgatttcacaagttcacgtgaaatacactaccaatatcaacaatcatgttaaatcaaatgaaatctatatcctctgggaatgcttgtggtatggcttagggacaagctttacttatgaacaatgatactgagacttcacaatagtcagctgtgcagatgtcagactttgcatttcacacatgcttttaacctagagctcaaataggcagttttaagccctggacctcaagtcaatgtggttcatgttttgtcacttcaagatctacaattgaacttcattacgatagtcttagatggtttttcataaattttgagtcatgaaaaactgacaacatatgagtctccaagtaccttttaatatatgcaatattttacctacttaattaatacatgtgtttatttgataactaaaaagtttataaagtctagaaataaagaaaagtccatgtcctttttcttttttgttttcttttaaatgaaaactcatgagaaataagagggcagaatgcattaaattatttcttctgtaacagcacaattctatatcagattttaaatacaaaagaacatgcaaagggataacagcattgacttcagttctaatataaataaggcaggaaattgggtgaaatcagtttttcctctaatcttacatggaaaaaaatttgtcatttggcaaacccatatgaatccgatctgtttggtttattcatccatgcagtgacattcagactccaaaaactgtatcagaaacctagtcaatatttaaatgccatcatatagattagaaatggaataaggtataggtaacttactgcatttcaaaaaaagtactaattgaaacatattgtcaaacatatatctttttctctctttagaaacctatggctattttctgtctttcagctcacgctacagaaaggcctatttttccttctgtcttagtccattcaagctgctgtaacaaaatatcatagccaggcacagtggctcatgcctgtaatcccagcactttgggaggccgaggtgggcagatcacttgaagtcaggagtttcagaccagcctgggcaacatgatgaaacctaatctctactaaaaatacaaaaaaatcagccaaatgtggtcacaagcacctgtaatcccagcaactcaggaggctaaggcactagaatcacttgcacctgggaaggagagggtgcagtgatctgagatcatggcactgaaatccagcccgagtgacagagcaaaactctctctctaaataaataaataaataaataaataaataaataaataaataaatcacgagctgggtggcttataaacaacataaatttatttctcacagttctggagactagaatgtccaaggtcaaggcacggtagacttggtattttgtgagggctcatttcctgggtcatagatagtgcctctggctttgtcctcacatggtggaaggggcaaggcagctctcttgggcctcctttataagccactaatccccttataagggctgtgctctcatgacctaattatctcccaaaggccccacctcctaataccatcacattggtgatgaggtttcatcgcatatgaatgtggggagggacacaaacattcagactatagtatctgctttttgccacagaatgaagaataaaccacgtcttataaataaaaatctttccatggtcccccaccacataaggacatgaccaacttcctttgctagtcatccatctctcataatcctctccagcccatctctgcagcctcatctccacccacacatgcattctgctgtaacaaatggtgggcaggcttccaaatgtactgtgttcccatgaagttgcacctttgctgatgttattctctttgcctgggtcccctccccatctattcactcctttctgcacttcacccttgctcttcttgtgccctaatagctcctccttttgtgacacatcaaaaattgcccactgtaggaagcccctccaagactaagagtgcctctctctgtgttcctgcatgtgcttttggagcccttatcacacagttgctctagaattgttagcttgaccacactgtgagttttcttaagggcagggacttattcctctttgcatatctggaatcttacccagtgtttagtacatactacatgttcaataaatatttgttcaatgaatcaatgaattgataggttttcttttagtagaaggaataaggtacattttttttagaacagcatccgaaaagcaagcaggaaaaattgggacatctttgcttaaggtaaaaatgcttttatggggaccacctttgaaactccatctacttggatccttttagtcttctttatgagataggaatattaattcttagatccaattaaagaaggtctagttaccaaggaacaaaacaaattggtatagaatggactttcttataagagagtcccaaatcatagatcataaggacaatcttatgttgaaatgtctcaataacttccaaatgccgatgtgaatgatatcatcaaacagtgtgagtcaaaggaagaaatgggattcctaagttttcattgtactccttgactattttattggtgtacagtctcttgacaattattttctcatcttctttcccaaggaaactttagatttaatatgtttattctgcaagatgtttggagacaggtatacaccctaaaaccaccattacaatcaatgccataaacttattcattgcctccaaaagtttcctcccatctttttgggtttttttgttttgttttcctttcatggtaaggacacttaatataacagctacccttttaccaaatttctaagtatacaatatagtattgttgattgtatacttatgttatacagcagctttccagaacttattttgcaagactaaaactttgtaacccttgaccacatctaccaattcccatcttcccccagcctctggcaactaccattctactttctgcttccatcagtttgactattttggattatacatgtaagtgagatcatgcagtatttgtccttctgtgtctggtttattccacttagcatgatgtcctccagttccatccaacttgttgtaaatgacaggatttccttccttttttagggctgaataatatttcattgtatatgtgtgtgtgtgtgtgtgtgtgtgtgtgtgtgtgtgtgtgtgtgtatatatatatatcacatttcctttgtccattcatctgttgatggacatttaggttgcctctgtatcttagctattacaaatatgctgcagtgaaaatatctctttaagatccagatttcagttcttttggatatataccaagaagtgggactgctggatcaagttacttcctgtttcgaaagtagggcaccctctggacatttctacaactgaagtgattgattcttacttttggaagtcaggctatttgttggaatggtggggaaaaaagctagagcttaaaaataaatctaaagttggagaggggattattactgatggatgcattaattcaagggttactgatactctaaatacatttttaaaagttgtttgattaacaagtcaaaacagatggtttaatgacattttagagaggtttaatagagatccaactgaattaacaaatcaccatggtgtgcagaatattgaaaattcaccactagtagatttatggcatatttctgggtatttcattcccatttggtttattatgataaatcactgggaaacgggtagcctgtaggacatgacagcaaaccacactttggcaggaccagcatcagggctgcgtgcttttttaggaggctatgtagtctagctagcacagagtgacccagtgagagcttggttggctaggactttctggtggtagcccacagagctcacctgaaagagtaccaaggatgaaaatatcatcttggctaattggtctgctagttgatttaaaaaataaacaataaaaaaaatttccagtgtattttagcaaagtttaatattttgaagggggcagaaatgtagcatattttgggatcttaaatctgaatttgtgtctttttccagactttgtcagtgtctttgtctctctctccctctgccccctccatgtctccctccttccctccctccttctctctttcctttcctggtaagtatactagaaaaaagtatatttttttctcattttttttaacttaataacaacagcaacaatgacaacagtcaaactcttgaattctggtcacaatccagatcaataattttttccttgtagttaccttggaattaggttcttagcccctcactgctctctgtatatttctgtacaatattcatcagtttaaataagtacttcaatttcataccaaagtgccaagactatcctattttcactcatctttaactttcttctttttcatttcccacacccctgccattgccaaacaaaactgattatctctgtttttatctttcttttagactttttaaggcaataaaaaattggcttgctcagaaggctgatacactgagtgttagaataacccaaaggttagaatgctttggtcaacttatgggtatttttgatcacgtatatccatttttaaacctgccattcatgatggatcactgaccctggccctggccctgacccatctcaaaaagttactagcatgattactgattaacacttagactgttggcttgaagtttagtagcctgaaggaaaatttccagaggcattataataaggaagtttaattaagagttaatgttgactcaggaatattatgtatagcattgatccacagtgttgctaatgaattcattatgctgcaaatgcaagtgatttgttagtacattggccaataaaagtgaaatctgtctcaacaagaatgttgaaagaaagaaggcagtgaaactttcatctccactgggagtgaactaacttgccaaatctgggtcatcaatcatagtaaaatgttcaaaacaaataatgcatctttcatggttcactgtattcatcagcacttttgaagtcaccagtctagagtagtcgcctttggccaagttttcagtagcctgtggtttaggcaataagcctcaactgtctttctcgaggatatgttcccaggtggttgtactccatgggccattttcaatcaaatctgaaaggacaaaagggcagttctgtttatatgaaatgacatcatattataacctcaaaattgttgtcttaaaagtcaaatcattatctaaaaggtctcttagaattacttagagcttgaatgcaaaagactgaatttcccactcacgtacttcgccaacactcattacataggcaaaaaagtatagtaagtgtcacttatgtgagcctatgtatgtatgtagtgttatagggggtgggggtggcaggaaagacagctcaaatatgaaataattgaattattcattgccactgttctgattgcctttaaaaaaagttttatctggaagttatttcagacacactggaaagcttcatgggtagtgcaaaaaaaaaaaaaaaaccacatgcattcactcattgtaaacattccacctcatttgcagtatcactctatgtgcacatacacacaaatatacatacacacacattgtctttttttctctgaaccacctgagagaaaactgcacacatcatagccctctatccctaaactcctcgatgtattcctcccaagaacaaggacacttttctgtataactatagtctcaaacatctgattgcctttgaattttatagcatgacttatttatacctttttacttcgagttctaactcagatactgagctatagaggaacagctcaactattagttgagggatagctcagatgtctgatggaaaaaagtcacatcagtaacattttgaattctgcaaatatacacaatatgccaatgtatgggagataactaaatactggttttagagaaaatagatgagttaatacaaatagagattccccttaattaatagatcttatatgtttggttatatgtcttatccatgctattatagctagctagcattcattaggacagccagagaatcttgtctttctgtatttttatactgtttttcttcttctgatcagccgattccaggttttgaaagaatgaagtagttcctacttagataatgctattgccttgctccttaacagtaagcagtggagaagcagagtggacgctggtgatgctgcctttagtcctggagggagtgtcaaccagtgggtaatcattctgaccctgcaacacaaccatcccttcactatttcagtgaaggtctctacttcggtggtaggtctctactcaacatggtacttatagccgttttatacttgctatcttaaaaaaatatgcaggctttcactgctgtgaacagataattgatatttatgtttcataatctgtgaagatagctaacacatttctgacagttgcaattttttttcccaaaacgagtttgagcatgcctatccctctctacccaagtatatttaacagcatttctatctattggggaatctgagtgaggatgacaacgtgtcagggattagaatggacaggaagagtctctgtaagaggagggtgtgatgctggagcaatttatgaaaattgggtcccctggtaactgtagtggatgttatacagacagtcctgcagagtcatccacgaggctgactcactgacaatgtacacatagaggtgggcctcgagtgtgtgcaaataacaagtttactactgcaggcaaactcttcgtttattcatttgacagatttatattgaggggcactgttctaggagctggggatttggtaataaataagatagtcatggtccgtaacctcatagagcttacacataaactgttttgctttaaaatattgtacattcagaggtgtttgtgctccgaccatatgactgcaatatgtcatttgataaacctttcaggcatgacttggacccacccagaacttagctttaaagctatcagattgacaggaggagagaacactggctttagatgacaaatcatggaaataattatgaaaagaccatccagtttttaatgactttacaagaatagtgttcttgtgagactattgaataagaagaaatatatgaacatttgtatcattcaactgtctaactgataccaacaccaataaatatatgaacatccttattattcaagtgtctaatgagtgagggacagtgcctgtaggaaggagagcctcccaacaatggaagcagtgttattcttcatggtagggagaccattttttggttcctcacaatgacttccaggctggaatgatttccaagtagggcagggaagacaaatatctgaagcctaagggaagctccagggtgattcttgtagttttgtttggcagactttctaaaaagcattgtcagatagttttggagcaagcagtttagccatctactaccacacaatatattcaaatcagagtaagctggaagaaagtcatccaacatccaagtctcagcctggcctatgtgaacatacttcttcttaagactaagctgtaggggtactatgcttattacctcggtgtgaaataatctgtacaccagcaccccatgacatgcaatttacctatatgactaacctgcacatatacccctgaacgtaaaatttaaaaaatttttatagatatgttaaatttgagatgtttattgaacatcaaagcaaaaatggtgaatgaacagatatatgacacaaaaaagactaaggtataatcctatatcatgagtgaataggaattttttgttattggtgtttgcgttagttgagattttattcagcagtaaatagagagatttaaaatagaagtggcttaaggaagacagatatttctccttcatgtaaaatctgaaagttggcagtccgaggttaatatggcacctctatccagtacagtcttcaaggacacgtgctctttccatcttattgcactgtgaggtgtagcctctgttgctaaattcaactcaccatccaatatggctgctccgactccagccatcaacttcacattctagccagtaggaaagagaaaacaataaatacaggcagataaaaagatagatgacaaatttctcttaagggaagtttctagcacatcatataatatctacataacgcttctactaccaactcattcaccaaaacttagttatatggcaacacctggcaaccaaggaggctgtgaattttctctattttgggcagtcacatgcttacatgaaaacaggtatttgaaaacaagtgatgaagaaaagcatcaatattaggggacatttagcagtctctgccacaatgttgcctattaataatcctgcatacattttaaatatttaatatcagtctgcaacactctatttgcaaggtaatgtatagtataatctttaccatatgaacttagtagccatggtgttcaggaaagttgtgttattttgtgctagaatattttacctgccctaggtaagggcctaaagataaaatgtgctagactaattaattttaatggcatatagcaagagatttccagcgttaaagattgcatctccacctgcaatttgggaaaggaaaaactgatagcacaaaataaaagtagtgggtgtcctgaaaactgtctgatgctcttcatgttcttaccaactcatatcctcatctaaatttgaatcacaggtacattctgaccttgtcgtagagagagtcctaaagtctcacgagagaattaccgtgcttgttctaacaagactgtgttccagcaggcatgccaaaatttgatagctacaaatagggagatttgaaaggaaagaggtgggagaggtaatttcttttaactcaactgcatctggtggattaaggtagacaatattaccattttgctgacagaaggcagacatggcactaaagagggagaatgagcaaccacagagctgatttaatttccagtggggtttatggaagcaccaaaacatgatgtagccaaatgttcctaaaagtatgaagtaatttaatttgttccatcattacaagaaattaaagccaagcacaattacatcccagtagtaaaaggaacccgctgaattgccattgttattgactaaatgaagtgagatttctgattaccttgtccagcacattttaatttctgtctgtccatttattccaaatcacattacagggccttaactgatcttgacaaaataagctacattattaaggtgcagtttaacctgagaagctttaattactagattagagttttcaaatgggcatgtcttctagacttcagtacatttagggatgtaattattagagattctttgtttctgatgtgcaaaagagacccaagtttaaaaggaagacttaaacttacggaagtgatttttttttttcttccaccaagagtctctttgtagacaggtgtctgttctgttgggagtggacttacacctcctgaatgctgtgattgagagagctgcctccatagtggaaagcccccggtagagggtagtacccagatttccaaggggaggggagttgggggactaaacgatgtacagtgaaccctctcataagtagggtgtctagatgatttagcattcaaaccagaacactttttagaatgaaaggcaatgctattcataattacactggtataacaggcatagaccttggaagttccaggccaattaggatgtatggactctgtacctataaggaagacaaggcaatagatatgtaaacaaatcaatgtgatagtcattataggcatctggagaatgaaaggctctataggacactgtgggtgggtgggcatggagaacagtcactctcttagggatttctctcccctggaacaaaagttacactaatcatgtgacatctcagagcatgaagtttgtagctccctcaaccatattcatattcctctaacagtccagttaatgattctcagatgcattagaaactatggaaatattatagaaaagaagccttaacaggggaagtgtttcatgctttttcagttccattcaacaaacatttattggatacctagtatatgacagccagtgtttagcaccagagatcaaaaaatgaattcattatggttccagccccagagaaattcagtctagtaataaacacataattgtgatagactgtttagtgatttaataacttaaagagttaacttctgatttggttctcatgcatcaaacataatatttgccagtctctatctctacaaggagccctggatttttcccagtcccctactaatgctagataatatggcaaaatacacaggctgatcaggctgttttagagactcttttaagcagagatcttttgttttccagactgctaatttatttttttctacccagaaagcccttcctaccatctgagctattctgaccaaatcagcgaagacaagctacagagatttaggatgtctgggctaaaaaggtttgcttgtttaattagataaataatttgagaatgctttccaggattactgttcctaaccacattgataaatgctgggaagactatctcagttatccagcattggataacagactgttggagaagagtgaagcttcagtgtgagctgggaaagatcccaaaaatcctaacatgctctaggtgcctgcatataaaattcatcatcatagtgactttaggaccacttgctatttttcaggcactgctttacatacatagtcctatttaaataattttcagaatcatactgtgatataggtactgctttctccattttataaattagaaaacaagctaggttaattcacttttataaggtgccaagctagtcaatcagtggcaaagctcagatttggaaacaaggactgccttactccaaaaactgttctcttaaatttcagtgtttgtaaggtccctcactgccccagcataacccagcatttggtccattcaaggattaagaggaacagggatctgccagccttgtttctgcagaaaaaaatgggggaggcagagctggatctaaccaaacaggttaaatttaagtgccaggtttccgtgaaggagaattatgccagcaatggtttctcaccttaatgaattcatttctaaccattctttgccctgcaaagacagcaggatcctgggtccacagggcccagttcatggagaggagaaagaggcacataatgggagcaaaaagtgaagaattcaagctgcaaaatgtaacggaattctcaaagtgctgggttctcttcactcccttatctggcagctcctgttttttctcctttgcctcccacagttgccactttaaaaagtcatttttaatgtggcacatatacaccatggagtactatgcagccataaaaaagaatgagtttatgtcctttgcagggacgtgaatgaagctggaagccatcattctcagcaaactaacacaggaacagaaaacgaaacactgcatgttctcactcataagtgggagttgaacaatgagaacacatggacacagggaggggaacatcacacactggggcctggtgggggttgggggagcaaggggaggaagaacattagtacaaataccgaatgcatgcgggtcttaaaacctagtttgggttgatgggtgcagtaaaccaccatagcacatgtatacctatgtaataaacctgcacgttctgcacatgtatcccagaacttaaagtaaaaaaaaacacaagaaaacaaacaaacaaaaaaactcctttttaaacattgtctcagcgtccagtcagttgagtttctgcacttttagacactcaagccccttctttcgtcctttgctccagtggttgtagcttcctacctccttcttaccctcacccctaggcttccactttagagaatttggagaactggggaaagaaaagactgttttgtgcatggtgtgcctgcagcctagtgccatgagctggttcttgccgtgtctgagccaccagatccactccttctgtggttcacacgctattccctctatcccagccaagcttgcaaactctgatcatgaactaccaggtggaggcggggcatggatatcctccccaggaagcctgtctggaacctctgaacttttctgacctgtgcatgcctctaccacagcacaccttaatttcttttgaaatcactgcatttgttcatttgttagttgtttgcttctagatggtagacgccttgaggccagaattcttctgaactaagctttggaagttgagcacctcatagaataccaagcttctcgtattactggtggggttcaacaagtatttgttgagaagtgatgaatcaagctaaagtttaagtaggcaaagatgaatcacgtcataacctctggtttcctaactttgtctatagaaaaggctccttgctaggtaaaacaaaaacagaagaagtatgtggattctcttcaactttgggactcatcaccctgaatctctcagttatctcaagactgattccctccaccctggagggcctccctgcccctcctttgtacagcagtgaaaggcagaaattgaatagaaggagggaaagagggaaaaaggtctagatgatcaagtggcaaaaacaaataacccagcatgaacaagtatgcagagagggaactctgaggaaacttgctgacaaaagatagagatggaggtgaggtcaaccacaggggaataatgggggcagacaagtctaaggaggtagattttatagggacttcgaatagatgaactgaagtttggggaagacctaaaggcattaaaaatccagtataagttcttgattaaggacagatatcataataattattattataatacaaggggtgctttgggaacataggctatgtaggagggattgacagaggaagggaggaaagatctaggaaaatgagggccaaacggaaaggtgtccttctcctgttcatttgccaatgaaatgcctaggatatatggtggtctgctcctaccctccacagttctagccactgcaaccaggatgcccagcaaccatgtcattcattcattcatatggtctatctgtctcctataggcatttcagtgagtggccgctgctttatgtgttctgttggtaaacttgtagtaccctgagaaaactcacacattatggagaaattacttcaaaaaatatgcacagtagttaactgaaatctttttatgtgttctactctcacgtgaagtagagaagtagagggagagttttttaattataaaaagggaggaagagggaagagggaaacaaaactaacatttattaagcaaggtaatttcttacctcagtgttttcaaaccaattggtagatttcaaaatcaatttaaggggtcacaattaatactttaaaattaaataaaatagaaaacatcagagtgaatcatacatagtaaggataaatgttatttcatgttaaattatgtttcaattctctgtattggctcgaatatatatttactcttatgtgtatggtatatactgttcctatatatacatttcctttttattttatatatataattctttttattggtttaatttatactgaaatgcatggtttgttaaagactgtaaacaaattttgccatgactattatttataaaacacaagagtttctttaaataggagtccactgctctcctctaccttttaaaaataaatataggtataaaacctttttgtacattttttttatattactgaaagccagcatccacatgccttcaaaagtgagcacctcttactttaaacaaatctaccaggttatagtataaaatataaattttactgtagtttactgtcaataaactttgtaagccactgcttcatttcatttaaacttccccaaaaccttgtatgagtggagtctggggattcagaagaagacggtggtcatcacagaagttgaaattctctactgtttacttcttttcaaaggtcttgttagcggtggccttgaaggtgatgaagaaagacactttcaaggtggacaggtataattattgggtcaccaagaacaaatttgaaaaacaaaatatgccaattgaaattagcatgtagcacctaaatacccagaagcttcttcattgaataatttattcattgaataaattatgtaaactgaattagtaattcctagtgaaatagtggatgaattgagaatagtggtattggtaaaaatggaaaaaaatttttttcttttgagacagaatctcactctgtccctgaggctggagtgcagtggcacgatctgagctcactgcaacctctgcctcccaggttcaagtgagtcttgtgcctcgcttgaggcacaagattagatttagtagagatggggttttgctttgatggccaggctggtctcaaattcctggcctcaagtcatctgcccacctcgacttcccaaagtgctgggattacaggcatgagcgaccgtgcctggccaaaaaaaaaaaacaacaacaaaaaaaaacaaaaaacaaaacaacttaattcataaaacttaattcaacaatttaagagttatacttcaagaatgaagatatataatgaaaatatgaagtcttcagaaggacacacatataataattttagtaaatctcaaatttgtctcaaatcaaaaacttgctacacatatttttgtcttaattatcataattaaaaatgtctacacattacataatactatctagtaaatatgccctagagattgtgtgtgtgtgtgtgtgtgtgtgtgtgtgtgtgtgtgtgtatgtacacccattatgttttcagacaattggaagaaaattgttaggcaattgtttttcttttatcaaggagctgtcatttaagtgcaaagctggagtattcaaaataaaatttgggcttacaagatcagggcatggcaagacctatccagattgctgtggaataatatatgcttccaaacgctaatcttaaggatgaaaaacacataaatgacatgccttcttccccttgcttaccttagtgactacagtttaaataatctaaaatagcagataccatcaatactgttgctaattatgctacttttcagagaggtacaagagtccttgtacctctagtagtagtgataccactactagtatcaaaaatacaagattgttttgttaattttgaccatgttttaaaaaaagatagggaggagatgaattactattaaaagcagctcttatattttacatgtaatagatgataattacaagtttttaacaaataacacatttaagttgaactgaaccgccaaaaaagatagagatatgaatatatgatttttagattaaagttagttttaacattcaaataaagtgtgggaaaatggcctggaggccaccttctagggaatgtatttttagccctattttacaaaaaagaaaactgaggtacagagaagttaatttgcccaaatttgccccatggttgctaagttgcagagccagcatttgaaccactgttcccaagtcatactctttctattgcttgtaactgtcatcgtagaccactaaagtggatacctccacaactctttgctttccactgcatctggactaccacaatagctccttagtctccatccttctctcttctccattctatcctcttaggctaccagtgcacttatccaattcccacaatatccactagctcaaggccacacatttaagtgttcaactctatatcccttctcctccctggaatgtgtctactccacccagcccatttactgtccacacatacaacctttattcaggctgcagacatttcctacacctgaaaacaatgccagcggactccctcctcccacagccattaaaaccacagtcttccttgaagacctacatccaagttcaccttcttcctgaaacccagcacactgagctatagtccatacctccctctccctgctcgaactacagtagcactcccaggctgaatgatttatatgctaccttacactgtctctaggcagcagccgatcatgtgtctgattttctcagcaggttattatggttccttcctgggcccaggctgctgaatctttcatgttcttgtatttcacagcaactatcacatcagagaggctcaataaatatgtatggattttttgactattctctttcagggggaaaaagagagaaagaaaagaagaaagggagggaggaagattactctctgaccatttctcgatagcatacaaagtcaggaggaagagaaataaaatgtcgttagtggagatttcaaccatatgggaacctactaaacacatgtatttgttaatgttttggagttacctgacatataggtataggtataggaaaacctattccaggtattcttcaagaggtgatagttgttgtgtgaaaaatgcattctaaaatcaaacaggtttagataatgcttgttaataaaattaaatatctcattttgctgtggaccttctagcttttggtaggttcgtgtccattagaaatcactgtaaaaagcctacatatacaatatttcccaagcttgtttgaccacaaaacgtcattagtaaggagaatcttataaggacaatattgattggaacattctttgggaaatgtttgaaatgatcttcccagtaacctcagtgtaagtgatgctctgtcattaaccaatgacaaatacatattcttcctacatagttgacttttcatgatttggtgtggtcttgtaaaagctattctattttgttgtttgtttgtttttgagacagagtctcactctgttgcccaggctggagtgcagtggcaccatctcctccacctccagggttcaattgattctcctgcctcagcctcccaagaagctggaactacagacatgtgccacacacacctggctactttttgtatttttagtagagatgcggttttgccatgttgtctaggctggtcttgaactcctggcctcaagtgatctgctcgcatcagcctcccagagtgctgggattacaggcgtaagccactgtgcctggtctaaaagctattctaaatcataggttgttcactcacatttggctcagaactggttaatatttgagggttgatggtgatgatggaaaaatagtaactgttttaggattgagaatctgtggaaaaggaaggaaactctcaaatattaactaccttatttaaaattaacttatttaaacaactctgcaaagtggttcagtatacctactattgattgaataccttctatatgtcagatacagcccttggtactttacatttcttatgcatttctcataataaccctgtaattctcaatgtatacaatgtgctcaggtcttttaaatggcttatttcagataatacaactagaacaatggcaaggctggaattcaagttctgagtgactcaaaagtccatgctctttctgatctatcacactatttcccatgaagagctcttataggttgtggattcttctgtgtgtataataactttcttagccaaatctaaatctccatagatattcttgtaaaattataaaactaatttatcttattcgtgtatggagccagttcatatacaactggataagccaaatataaccgatatactcttgagttctgaaatttgttctctataatgcacacacagttaacaaatgtaggtttaccagtaggccaaaatagtttatcactcatatgtgttgcttgtaatgcaagtaatgagattaaaaattgtacataagaaattacctttctgagactctgttcatagcctgtttaaaagggcctagtcttttcgggaaatcttttgtgtgttttttcttttctttttctctttttttgggacagagtttcgctcttattgcccaggctggagtgcagtggcacaatctcggctcactgtaacctccgcctcccgggttcaagtgattctcctgcctcagcctcccaagtagctgggattacaggcacccgccaccatgcgtggctaatgttttgtattttctttagtagagatggggttcatcatgttggccaggctggtctcaaactcttgacctcaggtgatccacctgccttgggttcccaaaaggctgggattacagacatgagccaccatgcccggctgtgtgttttttcttaatcccagtcttcaactggacaaatgtctctttggcattacttcttaacccttaggtatctcatagtgagagagatataaatgctaaacagagatttatgagaaagttaaaaaaaagaagaagaagaaagcagagatagcgattccgaataaaagattctggggcagtgttgattaaaataattgctttcttttcttcactcaggaaagtattcttaacttggagtccttggtgacttcagggaagtcagtgaacacttttagagtgaaaaatattgataatatgaacttatgctcatttttctgggggtgtttgcatcagatgcacctttgtgcattcatctgtttctcccaaacatcatactggtgtattggtgaattcttttaaaattttactctattttgtaaggatcattacatatgaatgatataccataatacttgtcatttttattttaatgttaatatttcacttcagtaagacaccatgatctgcttgaccattaccaaattttggcaatgttagttcctaatactcttttaaaaaaagagaaagagtttgaaagcaaaagactgagaacaagagatagacgagggtgattacatgtaggaagccacacccaggccagtattactgtttgaatctcatttggaaataaatattcttatctgatagaaaacaagcatacttactgattattcactcacaaatatttgctgagtgcctgtaaatgtcaggaattttctagacagttatagaaaggcctagacacaaatataaaaatgacattagaaaagtcatacaggcagaagccagcaaattatttccaggtggaaagattggctaagatgggcagtcttggatgggatagtcttagatgtaaataaaagggaaaggtattgaaaagcagccgaaaaaggcctatgtgaacagaagtgtgacattaatacaataagtaggagagagttgtgcagcaggttcttaaaagaatgaaacaataaaaccagggtttaaggaagattattctgactttataaataggactgtgttgagaaaaagtgaatccaaggagatccagtagtagaccattatatgaatctagaaatacacagatgagaatttgactgaaggtgacagttacagaaattaagaagaaattggtaagtcaactggcaaagtattggatgggaatatggtaggggtaggagtggagataagcagagtgagtgtaaatatactccagaactttctatttattaatagctttatttctgagaatacctcaatttcaaatagaaaacatgtacccctgaagaacagttgagctaaactcacagaattccaggatcatggtattggatgggatccttgacaagtaactggtcagtttaggaattccctctacaaacatagctgaccccatccaggctaactataatgaacaaccttaaaaccaacacctaacccagatagtacaatttcagaaatcagataataaatgaatgttagagctgggtaggtgctaaagataatctgttcaaactccttgttttctctaaggaatactgtatgcagtaattgacaaaggtgaagaacaaaagactgttatatcctaagattgatagtatatgatggaaacacagatgctctcctacagtccccccagggaaataaaattgattcctaaaattacaacaagaatacgtaaatagcatacataattgtaactttttttaaacctgtttgcaaaaattgtcctgtaactttgttcaaacaacttcccagacaaaagcttcctcagtagcattctttaacaccctctttagtcttgtgttgctgaaatatgtgtttggaatgaaaattatcttagcgcaaacctgtgggtatatacggtctgtactgaatatcaatggcaaagccttgatatttgtcttagctcaagctgctataacaaaataccataaactgatggcttaaacaacaaacttttatttctcacagttctgggagctggaagtctgagatcagggtgtcagcatagtcaggttctggtgagggcatcttcagggttgcagactgcccacatagcatgtatccacatggtagaaagagagcaacctctggcctcttcttataatggcacgaatctaattcatgagggctccattctcatgacctaattacttccgaagggctttccctccaaataccgtgacaccggggattagatttcagcatatgaatattggagagacacaaacattcagtccataacaatattttcctttgacatttcctttttctttgctcctgagagtttttcctcctaactttctgcagcttctccttccccttcagggactgcttaggattttctccttatctggtcaccaacctcttaactggtctttacttttctgatctgcctttatactattcccagagtaatctttttgaaaagcaaatctgaccatgtgacttcctcacttagaagatttttaatggcctctttagaagaaaatattgtcttagaatagtatacaagtcctccaagactagttctccatctttatctttgtccactgtctgatctaaactttatatccctacctgtttgtagcttcctgaatggcctgtgttctctaagtgaacttcttcagaatgaatccctgttcattccttgaaattcttttttctttctaactaccctaaaaactgttccaggtaactattaagtttctggaccccgaggttatacctaggtattagttgataggctcactaaaattaatagaatgtttgcatttaagttagagacttgagtccaggagaaagtgaagatacaatggaggaggaagggaaaagaatctattaggcaatcaatgcaagattatttaactcacaacctctcacttgaactaaaataacttacaaggctcttgttattatctccaatctataggtgaaataaggccctagaaagattagtagctgaattgcctggaattgcttgtatgaagtggaatagagattggaatctttctccactcttccagtttctttcaaagaataatatcactcacagttgcacacatgtcacatgaagcccccaacctagatgcctaattaaacttagctcaaactccaattttttggacaaaaggcctccttattcttataaaagctttctcctctttctttgactcttctcttatgtcagctcagagagacatttctgcttgggccaatctggccttcaagctcagtcccttcaatgaataaaacaaaacaaaacaagtcgggattttgtaccttcagtaaccttattgacgattgggagaaagggaaaatgcacgggttggagttaccctttagaccaagctgactcctttctcttatatgcacacacacacacacacacacacacatcttcaataaccttattgatgattgggagaaaggaaaaatgtacaaattggagttaccctttagaccaagctgactcctttctcttacacacacatacacacacacacacacacacacattctctctctctctctcactctttcatgcccttacatacatgcacacacagagaccaagctgactcctttctcttacacacacacacatgcatgtgcacaaacacacattctctcgctctctcatgcgcttacacacatgcacacacatacatattccctctctagcaactggcatattcctcccctttcctgtgtagatgaggcacagattagttccacccaaaccaaagctcttcaaagtctcaccttctgtcataaatagctttatcgaacattttaatgcaggcagactctcgtgaaagaaattctggtgaattccattgtttttttctccatcttattacagtatgattaataagttagtgactacaaggttgtagtttttaagagcaagaagtccactccctttcaagtcacattgggcagtccttctgttcatacctgacatattgtgggaacatatgtctgcgtaggattttaatacagagattgtcttagataagaataatcgtcagagaagcaaatggtctataagttatttaattttattcttaatatggtcaaagataatggttgcactgacttcaactttactttcttcaattccattaattgcatagcactagaattttccatataaaataaaatcagatcccatgtcacacagtactctgagtcactctgtgactcctactcttgaagatatagtcctacctgcagatgcctgacatggccagtctttgagatggccagtggctgaggatttctcagatttctccagaatctgttcccctaagcaaggccctactcatggttatttcttttttgacacacacatcttttttttttttttttttttttttgagacagagtttttatgctcttgttgcccaggctggagtgcaatggcgcaacctctgctcactgcaacctctatctcccaggttcaagcgattctcctgcctcagcctcccaagtagctgggaatataggcatgtgccaccaagcccgactaattttgtatttttagtagagacagggtttctccatgtggatcaggctggtcttgaactcccgacctcaggtgatccacccacctcggcctcccaaagtgctgggattacaggcgtgagccaccacgcctggccgacacagacatcttgttcatcataggtctgtgtgcttgctcatcttttctcttaaaaatccttcccactctcttttatttcattcttgaggactcagccttttcccactccacctctgtccctgtctgatttaaatagtcctcttttactgtcccatagcccacatgcttccttctgtgagagtgcactctacagttgtttgctgaaattacctcctctgctggactctgggtaagggacacactcttttcatcatcttgtttctgcagcctctaataaagtgcatggcacatagtcagtgctaaataaatgttgagttactggtgggactaaaagtcaatgaaagccaacctcatgtttatttcatataaaaattctactagaggcataggcaacattcggaaaaacaattgtagttagtgagaagataaaagaaaaagaaaaccgtcacaaaattgcacacatctttcctttggaagctttatgaagtactaaataaagttttatatattttatacaattttaaaatacttcaaaacaataatttgatgccagaaatacacttggagatgagagcagcttgccactagcaaactctgcttaaacctattacatgtacacattgaaagagaatccaaagccttcatgtatttcccatcagataaaatgtatagaggaaaaaaaattaagtcagcaaaagttagacctaacctacacaaatcttttactgtagcaaactaaaggaatgactagctcaaagcaatacacggtgaaacagaaatcattttttccagttctatctactgtagacagtatcaattccttccttagaacaaaggggaaattttgtaagaattaagagaagagaagctggaactggttagggagatttaagtatttgctcttaggagctttttgttgtagttcttttatttttaaaaaatctggatcagtgctcatcatgactggccatcagagaaatgcaaatcaaaaccacaatgagataccatctcacaccagttagaatggcaatcattaaaaagtcaggaaacaacaggtgctggagaggatgtgaagaaataggaacacttttacactgttggtgggactgtaaactagttcaaccattgtggaagacagtgtggcgattcctcaagggtctagaactagaaataccatttgacccagccatcccattactgggtatatacccaaaggattataaatcatgctgctataaagacacatgcacacgtatgtttattgtggcactattcacaatagcaaagacttggaaccaacccaaatgtccatcaatgatagactggattaagaaaatgtggcacatatacaccatggaatactatgcagccatgaaaaaggatgagttcatgtcctttgtaggaacatggatgaaattggaaaccatcattctcagcaaactatcacaaggacaaaaaaccaaataccgcatgttctcactcataggtgggaattgaacaatgcgaacacatggacataggaaggggaacatcacacaccggggcctgctgtggggtggggggaagggggagggatagcattaggagatatacctaatgtaaatgaggagttaatgggtgcagcacaccaacatggcacatgtatacatatgaaactaacctgcacattgtgcacatgtaccctagaacttaaagtgtaataataaaaaaaatctggatcagttgttataattttttttgtttttttgagtcggagtcttctgctgttgtccaggttggagtgcagtggcccaatctcagcttactgcaacctctgcctgccgggttcacgccattctcctgcctcagcctcccgagtagctgggactacaggcgcccgccaccatgcacggctagtattttgtatttttagtagagccaaggtttcactgtgttagccaggatggtcttgatctcttgacttcatgatctgcccgccttggcctcccaaagtgctgggattacaggcgtgagccactgtgcccgacctcagctgttataatttgtattttttttttaaattaagggcatacaaatagtgtccaaaataagtggtattttttggacttgttctcttcatgtataccaataggtctatctaggaattatgacaagccgatacagtcctttagcagaccttcaagtgttggcaaagaaactaatgtccacatagttacacatcccgtacagtggatccttttacctcaatggtcaacatcactgtgagttgtgggtaagagtaatggactgaacatttcacaaaaaatgacctcaacctctagctaactgctgtggctctgaggtgattacttttttcctttttcaaaaggaagctgcttcttcagcatcttctcctggagcccctggcacagtttcaggccatgtgtcaggggaacctctaagcatatcactgtgacagaagccaagtgctggcccgcaagaattgaggactgtttgttcacagaagagcctcagcagaatgcgggtgttacatagttcaaaggtgccttgaagaaaactgatgctgttgtagcaggggccttcaaggctcaatttatttctcagttgctgttccatagccctctcccagcctttagggagtttagccaatagtttttgcttgggtgtttttctctgtttagttccttgacttagcaagatttggtgcagttaaagagttttcatgtatttttaaggagagccacagtgtatactactctggcaggggttgaggggaagtattttattaatgaatgcagtatgtgttcttggtaaaagccaaaattaaactggctcactgtttttgtcctgctagctgtcgacatttaggtgtgttgcttggtgtggtgactcaatttcctgtgggatagttggcaactccactttgaggtttgttcggcgggatgaaaaggtcagttacttgatgtcttagaacacttggggttaaaattcctaaaagtgaagctttacaaatgatcctgaaaaatcgtggctagctatattgcctactcacctaggaatttggaaaaaagcaatattctcagctctatgctaatatcaagaataattctttatttgagcaacagtttcacagagcaaactttactctgttagtaattattttctcactagcatgtagatgtgttccagtgatttttcatttttcttatttatacagatgttagaacttaaaatatatgcttaccccattttatcatcatactcaaatcctgtctgtcaaaagtggctggtgcatggcttggacataaaatggatattctgaagtaaattgttcctcctgtcactatactaccttcttaagaacaaatcctgtgtataaagtgcatgatgtcttgaagcattagccaaaactttcctgaattattttccacattaaaaaataacaactgaaatataatgtgtggagccacatcctgttagatttgaagcctgagtctgaaaagctttgggaacttggtgaagatggaggaagggggcagtttacttagctactgggaaatcacttgaggctcaggctttgagaaagttggagtgcaggggagaggagccacagaaagccgaacctcagaggggactcccagcttcattgtaaccaatgattgaaaagatggcactgaacaaatcccagacacaatggttatgcatctttaatccactggataggctaactatggacagctcaaatgatcataaaacaagtcaatgtcctcttaaaatttcctacattcctatattatgggaatgagagagagaggaaaatatcaaaaccaaaccatatagtagatgcactaccatggcaactaggtgatgctatacttgcatatggaagttattcagtaaaatgaaaatgattgtgttagagccataggcgaaagtattgtttgtgatctttagggtgtggggttacaatggacttcctatatttgtgtgtaatgcttcaatttttataacaagcatgtaatattttttacattcttagaattggggaagctatacagagcaggtattttatatttaccatttaaaattattaatatctttaagcttgttaagggggaaaaaaaagcttcaatctgaaactttaattcacctggcaaggtttaggcagttgtttgtccatctaaagtatatatttacatagactgcggggtggaggaagtagaacaaaaaagaggcaaattttaacctagagtactcaaagtgaacagtaaatagttcaagtattcttgataacaataagccacgtggcacatgtaacaactactttaaaagttactctaacttttacaaagttcacataaaaagctatctcaaaaatcccaggagcctaaattcagtccatgaactttatttgttgtgccatgttaatttatggagtctaaatttcaagggcagaatttcttctccaatacctgtagattcaaagacaaagacaagggatcccaccacttagtgtaagtttctcagtatcttctttccactcgacaatgacaaagttttatcaaatggacccttgggagtttgacttctcctcactatgaatggtttgcttattgcatgctaatgtagaaaagttctcccacaactgatctgcttagggacagtgtccctggtgccctgggtcagcctttgtaaacagaacaggcttttctgtatgcctttgaatatggtctttccgttttctcaaaattgtagtgtactctgcacatggtgggtagaaacacccttccagattttcttccttggcccaagatcatctaggtcttatgcaattcacaggggaaaggagtagtatgcaggacatgcgtaaattctccttaccatgtggttctttcacattgctgttcctttaagagaactcttaggcaattcggcatatgaaaatgcagcctattgtcaaatttgtgaattataaagcgttccgaccccacaacattgtatattttgtttgcttgtttctgtccgccccaacatttagaagtctggtacttagtagggactgggctgggtagaaaaagaatgcggtcttaattcccacaaccctgcctccttgaagtaggtgaatcctaagcctttagaaacgaacccccagaaaccctaaaacttaaaccctcagaaaccttgagggtcctaaataaccttgtttgtgaaacttcgcaggaagcagccggtcgtggagtcgcagaggctccagcggtctgggcaacctggagggcagtggctcggcggggcgcgcggggttctagcgagacaggtgcgcggccgtgcgcgcctgcgtgccggtccctcctgagccccgcggcgggcgcgaccccggacggcggactgcaggcgctccacgccgggttttccgccgctctcctagcacagacagtcccacagcagccccacagacacacacgctcgcgcccgcgcctcctcgtctgcacttcaaagcgagtggcgcccggctgcgccggggggatggcactgcgaggtggcggggcccccggggcagagctcgaggggaaggacgcggcgggtggcacggacagggacaggcttttgcaattcggaatcttttcgtaagggggttgaggaggagccaggcagcgccgagggccgagaggggcgtgagggggagtgttcccggaaagctgcggcgttggagccgcgctgcgcctgccgcccgaggagttgagaaagaaaacaggaaacgtggtggccgcgcacccggccgcggctgattcattcacttcaagtgccgtgcagaaggctcggcaggcggggcgggcgtggggccgcggctccgggttggggaccgaggagatccggctgtggaccagacgctcctctgcggggcgggcacccaagcgcgctcgccaccccctcgccatccgctagagccgggctcctggactgggactcgggcccgccgcacagttgaaaagtcgcatagtggtttttccgctcgcgtcgctgtgtgaaagttggctcgccgctctttgcacgccctccctggaggccgacccgagacgccaagctggagagaccgtgcctccccgaggccggccgccccgcgagcacagcctccgcccccgttgcactgccgggctgggcaatatgaaggagcagccctcatgtgccggcaccgggcatccgagcatggcggggtatggcaggatggccccctttgaactcgctagcggacccgtgaagcgcttgagaactgagtccccctttccctgtctcttcgcagaggaggcctaccagaaactggccagcgagaccctggaggagctggactggtgtctggaccagctagagaccctacagaccaggcactccgtcagtgagatggcctccaacaaggtaagccccggttctgctgtcactggtgcccccaggctgctgattcccatgccggcgagccactggtacccatagccccgggaaataaattgagaggttttttaggcttactgcatgttggctattctgctccttagagggaggttcctgtttccttgctttgcctcccctagtcacgccagataaacattttccaaaagcaatttgacgtgctaaatttaagtatctcccaagacacagggttcctaagtaacactgagcccttgcagcagaaacccagtagggtccatgggcattgcatgtttaaaggtgttcttgggattcccggttgaaaataagaattggtggatgtctgtgaaatcacttgaatgtcaccacctagggcactcaaactcagaagagttcatcgaacttggaaccttcaccctaattcatctagttgtcagggtaccccgcaagaactgagcctttatatattcagttggccatacatatccgcaggaaacattaacagagttagaaggttccttatgatcattacttttgtttccattaatcttggaaagaaagcccagttttttgaggtcatttagtacaaggaggcttcaactaggcatctgtgccatatgtgctaaggtgctggtcttggcagttaatggagttttgagggctgagaagtaaccttcagcctgggacagccttaaaatagcacggaaggcaaggtatagtgttttcagttttgctgtattttttggatttcctgttctttttgtctttagttatgcaaggagataattggaattgtgtatgtttttagtggctatttgcctgtgcatgtcgtatgcagatggctgaaggattcagccagtaaggactggtaatgttgtgagacaattagtaatagttgcctcgtcaagatatttaagtatttttggccacctatttacaaggtcaagaaggttatattatcttacagttcatctatgtgcacatatctttaaatgagtgatgcttttttttttctacctttctatggtttttatcccacctgttctcatgcagtttttacaaaaaggccacggcataacagccacttgattgtcttatctattaacagtgcttttgtaggtagcattgtcaagtgaaaagttggcttcaaataaataaaaggggctctgtagacacggccagcagatactaacctacccatatgcacactgacctacccatgtccacactgatgatcaatttttttgtcatttgtgcctcatttctaaatttggcacagctcctcatcagaatgaccaattattgctctcttactgggacttttaccccctgctgtagcattaggcacctttattctcatctgagtaacaaattcttagttttataaaatatagtttgttttcataatttgattctcaatagcagtagacatatgctgaatatgtccagtgtcctaactgctaaatgggagcactttgccatgggcctgagttcttaattctattgtgtggttgattctgtgtaagaaaatgaagagcagaatcaaaagccacttagcaatgtgcaagcattagtgtatgttttcaaggtgattcgacagtagtttttcagctaaatgaatttgagcagctagttactttccctaaaatccatattcttaatgttgagatctatgtttggatttaaaactgaatgtgaaatttaataatgtattgtaaatgacttcagctgtcaaggaattaatctatacgttaagatttaaaaattttttaggtcataataattgcctaaaatgattcctttcttttaaaggcaccagataagacagggatttaaaaaaaaaatctttattatgaaggccccagattagactttgagttaatttacaggtttaataggagaggttggtctgtttggttaaaatgaaatctaggtaaagtgagaagataattttttcaaaatgtagtcattctagcaatgtttatgtcttgtggctgaaaaattaggatattttttcctagcccacgacagagctgaattgaaaaattattgctgtcacactaatttttaacattaaacttagctcagcttaagctgttgcttaaacttttaatgtccaagccattcgtgtcttctttaacttatttatttctaaatcagtgctaagcttacatgactgttatagacaaaaaagggttagcacagaaagaaaaaaaagctcttgctaaaggttgtaaagttacccttcttcttcataacaagggcatgaataagccacatccacaaaagctgtaaactgagttggagcagctgatcggaaggcccctgtgagtgttgccacaccttcagtctgaactggaaatgtgtacagcttgcatcatctccactcagttatttgatatttcttgagtatgaatgaatgagtcagaaacattgcttttcagttgttagttttattaccatccattctttttacatacacgtgttcaaactgatattttcagtttattctcctttagcctttgaaaaattatgacagttttctgtgttctctcttgaggttttaaaaaatttactctaatagattgaaaagcacaataaaaacactagtaagagatcaggatttttaaatggtgatagagaatacttattatggagatggatttaggtattaggaaggaggaaactgattcctcaaacccatttaacaaactgggttaacacattatttctgtttcttagacttctcaataaaaggcatcttagccaattagcagcttttaaatgatgctctaggagcaactagctgtatttcctgtattggtattatatatgtttcttgcttgttgatggcattgaagcaggaaaattattgaattcttggccaaggctagggttggctgtaacacatgtaggatgcttgtaccaagtagggtaagagattccagatggcatttaatttgagtgattaaatctatggcatttacccttataagcacattaatctgcctgagatttgtacagatttcctttggaacctcattgctacaattgagggtaattttagtgaggtctcaaagctttggaggcaggcaaacctggaagttgaattatggttttgtttcttgctaatggagttacattagagaaatgacttcaattttttttagcttcagtttccttagcatacaatgggcaccataataactatcttgaaaagtcagtgtaagagttcaaaagaatatatacaaaagagctagctaatatagtatctgacaatagtaggcactgtatctgttgttattgctattatttgggttttaggtcaaacttcattggttgcctacgtggctaaaatgtctttttaccattcggttgtaatttataccagacacttcaagtttgatggatttttataattcttagataactgtctatagcacacatttctgtatcataaaaatgcttaaattatatttacagtttttgtggtataatacagacatgaacattctgaagttctaattagaagtttaggcttttcttaaattccagttacagaatgccagacagaagagctaactaagtacttttcctgttttactctaaaactgaaaatgcagaccttactaatttttagaacatgtgaaatgtaataagggttagtggtcaatgtgccttttcagtaaaacaccttttaagcagaatagtttcaccatgtttttggttacctttctctcatggaaagtatattgaggatgggagtcagtagagaggagagcaggacagcggcctgggcctcagggctttcaaggattatgctatggaaccctgtaacgttatcctcttgtgacctaataatgcacatttcaccaggccttccctgtaagttcagtgaggttcaaaggagaaaacgaaatcattttgagttattcccaagacatatcactataaaaatgtattttgtttctgctctaattttgggggcagtttgaggtttggcatggctggaaatgactgtgtttcaagctgaaagtctgtcttgaagttagaatccagaccctttctaagagacttcagatttttctatacttcattccaaatatacttaggccagctttacaaatgtggtcatgacttctttatggaatttattttgtgtatttggcttttggcaaacctctctagcatgtttctgttgcctataaattaaattgctttgctgggtgctttgtctcagagctttctctggctgctccccctactgctttgtaatagtcaatgcagaacatatagtaggactttttgttgatgtattttcttctgggcaagaggggtgttataacaaatataggatcttcatagaagtggctaaatcttaagatatttccacattatgcaactacagtgtaactcaacagatataaatgttaaacttttgctaagaaggaaactaagttaattggaaaaggcatgttagttttatagagagaaaacagcctcagttgttttctacattaacatattaaatcttagattaaaaaagtgttaatatgcctaaatacaaactttaaatttcaaaagaaaatatcttctataattatagaaaatcaacatttagatgttttgagttcgatatctgctttttcatctactcaataaaggtagatttgggaaagatttatgtagcttacatgtagtaccttaaagttaatatgaaagattgagaatcctataatcactgttagaaaaaatactttctttgcttttaagtaataatggaagagggaaacaattttaaaggaaatttttctttcactgaaaagtagagcccttgatgttaccttagcataaaacttaggattaaaacaaatcttaacttgtctctgttgtcatccgttcagttcctgtgccagtatttagtgaaagtttaattattcccaacatttaattatcaaaaactcctaatttttaattattcaataaattaatcattactagataaatttctttttttcagttacattttgacttaatatttggggtagtagtggtaacttctgtctgagagcattatgaactgtctacgttttcgaaaaaaattccgaaacataaggattgcccatgataaaagaagtattttttctaatgttatgggtagattaaacaaactggtatttttctagagagaaaggatgatagataatgcttttgttcagtttaagaagatttctgcgatagttacatagactgtagctatcacttaagatataaatacatgatggatgtgcagtgctgtttatgtcattattttcagtggattcacaaaatatgtagggtttggttttctctttttcagcaggagggaccaactctttttctagaactgtagattgctggggttaattttgtgatagcgtagctctagtaggggagcagtttttacatggctatttgttgtaatagtttaattgacactgttagtctgagatctttctagaatgtagagagatcagtagcactttattttaatattcacattagttttgaaaggcatttgaagaagactttttttattccctgtaacagggattggggggtatgccttgatatttgcttaaacaacaaacaattctgctgcgtccattaggaaattagttaagttcagtgaccaactacaatgacaataggtttattatcttttactcttagagaatagtttatcttttataaagtatttattattattatttagtattcagagcttcttgtttttgttttgttatactttgtatgtgataaggatgaatgatatttactccctggcctggagtaggcaccagtgatacttacagcagctttgtacagtgaaaagaacataaatgtttttcattaggcaaacttggtttcaaattccagctctgttgtttcctatctaatattttgggcaataggccttaccgctctggagctcagttttttcatttataagtggcgataatgaaaggggaaaataaaatgaaaaagttattgagaccattagctataatgtatgtaaagctccgtttggtgcattagcacacactgggtgctcaataaattgcatgtgcttgcctgtctagaatatactaaaaaagagagattaagaaaaactctgtgtcacatatttcttgcaatgtaaaaacataatatttcttagaagaaaaacatgacttttctattctttaagaatttacagtccaaattaatgttgctcaaactttgtcatttttgagacagagtctcgctctgtcgccaggctggagtacagtgatacgatctcagctcactgcaacctccgcctcccaagttcaagcaattctcctgcctcagcctcccgagtagctggactacaggcgcatgccaccatgcccagctaatttttgtattttgagtagagatggggtttcaccatgttggccaggatggtctcgatctcttgacctcgtgatcctccctcctcggcctcccacagtgctgggattttgtcatttctgtgtacattcatatctgctattatatgttgaatgttttaacttaatgtattttttattaatctttaaaatttatttgtcaattattcttaattgacaaatattaattgtatctatttcttgggtataatgtgatttttaaaatgtgtacatcatagaaagatttagtaaagctaattaacatatctatattacctcaccaatttatctttttgtgatgagaatgtcaaaaatctattttagaaattgtaaaacatataatacgttattaattactggggtctccatgcagtgcaataatgatcactaaaacttattcctccaatctaactgaaattttgtactgtttgatcgacatcttccatttctctctccctcctcctctacagcctctggtaacccacctttctactctctgtttctgagatcgacttttctagattccccataaagtgagatcatttattaaagacaatatttgtctttctgtgcctgacttatctcacttagcataatgtcctgtagttccattccatgatgttgtgaatgacagaatttctttcttttataaggctgtgtaatcttttttttttttttttttttttttttttggaggtggagtctcgctttgtagcccaggctggagtgcagtggtgtgatctcggctcactgcaagctccgcctcccaggttcatgccattctcctgcctcagcctcctgagtagctgggactacaggcgcccgctaccacgccccactaattttttgtatttttaagtagagatggggttttactatgttagccaggatggtctcgatctcctgaccttgtgatctgcccgcctcggcctcccaaagtgctgggattacagatctgagccactgcgcccggcctgtataatctatatatatatatatatatatatatatatatatatatatatatcacattttctttatgcacacttgatgaacacttagattgcttccatatcttggctgttgtaaataaagctgaaatgaatatgggagtgcaaatatctttttgatgtaccaatttcagttcctttgggtgtatacctagaagtaggattgttggattttatggtagttctatttttagatttttgaggaaccttcatactattttcaataatggtggttctaatttacattcccaccaacagtgtagaagggctcccttttctccacatccttgccaacacttgttatcattcatctgtttgaacatagccattgtacatggtggagagcaacacatactggggtctgttggcgggtgggatgggtgcagggagagcatcaggaagaatggctagtggatgctgggcttagtgcctaggtgatgggatgatacgtgaagcaaacatggcacatgtttacctatgtaacaaacctgcacatcctgcacatcctgcacatgtacccctgaacttaaaagttgaagagaaaaaaaaggaaaatagtcattctaacaggcatgaggtgatagctcattgtggttttaattgcatttccctgagaattagagatattgttgagttttcgtttgtttttgagacagggtcttgctcttttgttcaggctggagtgcagtggcgtgatcatgtctcactgtaacctcaaattctcgggctcaatgatcctgcctcagcctcccaagtagccaggactacaggtgtgtgccaccatacctggctttttattttttcgtatagagagggtcttgctattttgcccaggcttgtctagaattcctggcctcaagtgatctcctgcctcagcctcccaaagcactgggattacaggcatgagccactgtgcagggctggggaacattgttttttttttttttttttttttttgtatctctgttggccattcatatttcttttttgaggaaagtgtgtctattcagatcctttgtctaattttaatcgatttgttttcttactatttggttgtttgaattttttatatattttgaatattagcctcttatcagatgtatggtttgcagatattttctcctgatccatgggttgtcttttcactctattatttggttgcttgtgcaggtactttttagtttaatgtagtcctatttgtctatttttgttttagttgcctgtgcttttggagtcctatccaagaaatcattgcccagaccattgttgtggagattttcccttatattttcttctagtagctttacagtttcaggtcttatgtttaagcctttatatctcttttgagttgatttttatatggagtgtgagataagagtacagtttctttcttctgcaggtggacatccagttttcccaacactatttgaagagactgtcctctctccattgtgtgttcttggaccctttgtcaaaaatcaattgactgtaaatacttggatttacttctgggctttctatcctgttccattggttgatgtttgtttttatgtcaataacatgctgttttgattacagtagctttataatatattttgaaatgagggaatatgatgcctgcagctttgttctttttgttcaagattgctttggctattaggtctttttttggttcatataaattttaagatttttttctctatttctgtgaaaaaaaaagacattggaattttgaaaggaattgcattgaatcaatagaggaactgcattgaatctatagatggctttggatagtgtggacattttaacattactaattctttcagtgcatgaacatgggatatcttttcatttatttctgtcttcttcagttgtttaaatcaatgtcttgtagtttccagtgtatagatctttcaccttgttggttagatttgctcctaagttttttttttttttttttttttgtgatggagtctcgctctgttgcccaggctagagtgcagtggcgcgatctcggcttactgcaagctccacctcccaggttcacgccgttctcctgcctcagcctcccaattagctgggactacaggcgcctgccaccacacctgccttttttttttttgtatttttaagtagagacggggtttcactgtgttagccaggatggtctcgatctcctgacctcatgatctgcccgcctcggcctcccaaagtgctgggattacaggagtgagccaccacgcctggctgctcctaagtatttttttgatgctattgcaaatgggattattttcttaatttcttttttggataatttattgtcaaagtatagaaatgctaagagcaacttattgttaaatctaaatactcacccaagtgcctcatcttaagtaatggtatacatgaaatcataggtttgatgttcaagttatattttttctgtattttttctaaaattaatgaataacaaaatgagaaaacattcatcttgcaccaccttaaagcattttgcctaccatttactaacactgggcatacttttggacacactagtctaaatcagctgcaagaacaatttagagactaatttattgttttaaacaatcaacatttttccttctttaccctcagttggatttctccactagaggagaaaatggcaaattcgttcagcagaaatattccaattcataaaatattcattccttaggcagaatggtccgtggatttagagcaccctactatagacagcctgcctgaattggattcattctctgccttttaccaaacgtaaattgggccacgttgccttctgtgcttcagttttctcatctgttaaatagttgctgtggtgatttaatgaattaaaagatgggaattgtctcgactgagtcaggaatcatactagatactcagtagaactcattcatttccatatgtgaaggaataacattagtttttattttattattttggggggtgagggttagagaagggtgtctgccatcctgatttctatccttttgataaagtgacctaataatattgatactaaccaaagaggactattataatgttttatttactcttctcccccattaatcactttttttggtggtgttttatatgttttattcctttattttcatccttcaaggagtttgccctttgtttccttctgtaattttacagtatagctcatcaagcaagcctgagatttttgtcagaatatctgaaaatctctgagctttttctagcagaaatgcataatgcagtgcagaagaatagtctagccagtgtttttcataaatgaatgtacatacgttcttcctctgcataagactgaaagtaacccaggcacacaatatcttattaatatttaatattaagaaaagtatattaagaaggtaactctccattctacctctcaacatcttaccatctagtatacacacaaatatttccttgctctatcagccgagagggtctagaagctaccataccccagtagcaatgagcacacttagcaccctcattttggtttctaataccattctctggtaaaaggaaccaagactctttgaaaaaaaatagctgatttctagggactcaggaaggaaatatgtaagatgagcctggagcatcttgtagtgccaaaaagtaaggacctgctcaaacaaatggaaccctacacccgtgggaatatactgaagagttgcaagagcaaactgaaagagctcccaatggccaaagctagaacaatttgagcaagaaaataatatagtattggattatatcccaaagggtaaaataaatatccataaacccatattgatacaatttattaaataaatacctaagtgggggaaaatagacaaatctcctcctgtgcggaattcccaataacttctatagatactctactctcaaggagggagaacataaccccctacaccgtaagtgtgagctgtgcatattgacttccttctaaacagtacagtgtagaaagggaaaaaaaagaaactgtagtggagaaacctatcactacttcagccaggttatcaaggtcaacattgacagtgataagtgataacatgtaccctcgatatgatctgatgaaaatggcacttttaatctgtggtttccctactgaaaacatataaccccagtgtaatcatgaggcaaataccagacagatctcagttgagggatattctaccctcgaaacttgaccagtatttgaccagtactcctcaaaactgtcaaggttatcaaaaacaaggaaaacctgagatacctacagccaagaagagcctcaggagacatgaggactaaatattatgtggtatcctggatgggatccagaacagaaaaaaggaaattacgtgaaaactaaggaaatctgaatgaagtgtggactttgtttaataataatgtatcagtattggttcaataattgtgacaaatgtgccatactaaagtcagacattaaaaatgggaaacagtgtagagtatataggaattatctgtaatgtctacacaagttttctgtaaatctagatctgttctaaaacaaaaagttttatttaaaagatcgaagccatcttttaaggcctatctggaatgttacatcctttataaagcctttttttttaatcccatcttcttcccatcctatatctggggtgtcctatgtctcccacctcaggctttcctaattggatacctttgactttccacagaacttttatttgtaattctcttaactcttagtacaatattttgtgtctctgttttattgttctgatgaggtcttctacagtgtttttagcccaacccagtgagtgtctggtgccttagaccacttggccatcctgacaccctacacagtgagtgtcaatataacattttgtagttagtcacataaattagtacaagaatgcatgatgttggttaatgcaaatgctgttttttaccttgtattggtagatggagagtctgagcattctactttgtgcctttcaagaaaggtttttttctttttctttcagtgacaggaatcctgagcatttctcacttaatctcagttctgcttttagatactcatgtctcagaaattttatcatagtatatgctagatcaatctcatctcgtttaaattaaaagtttgtagtgcacaggcaaaaaccatagaggccatattcatggtcataaactgctctttctcatctctacctattttagcaataacattcttcttattagtttgttccaagtgaaaatgacataactgaatactttccctgctagtctgggaagaaaggatgtgtttgttggcttttgcctgtcagagagtattctgcaatgtttgcctagggcatgcttgcattcccatcagcatctctggtctgctgcactgtaatccctatagggacagcctctggcttttattactgacaagcagtgcactgtgcagccataggcaccataataggaaacaccttggcctgtcataaacaggtctggagagtagaaagtacaggcctgctggggatgtgtccatagcaaagaggcaaagatgcggctgccatattggagtaagtgcaggctaatgtctgccatctccatttcagaaaataactggctgattttgaagctgctttttgtataaacagtagtgttttggttgctttttgtttttggcttaaatatgaataaagccatcttaaagagattatacccttcaaagtattttgagaagatctataaagtattttccttttgttattttacatttaattctacctgatcattccaatccaaacccaatagagaaggaaaaacagatatttcactatagtgggaaattaggaaaaaaagaaccatgcaaaaatacaagtgattgtgtgtcttttaaaagaattacaaatcacactgaattacccaaaattacaaagaaaagtgcatttattattaaggtaacttgtgttgtctgtgcctttacatcaactccaagttttataaaaggagtacattctttgaccataaagactttatatttgttagtgtttttttcaatctttagggaaaaaatgaactgcaatattaatgataggctttgtagcaagaatttaggaagacaataaatttcaaaattggaagggttatcacagtttttaataaagagataaaattatttcatgagtgctttaaatatatataggtgtcattttattatttacaaggaaacccatttcacaaaagaggctaaagactgtaaagattgaacaaagctataatcctgttaaaaattaagataggtttaggaaaactaaagtcctaattttttttttttgaccactttggccagagctgttcataaattaggtaatcaatatttgttgactagtcccctcccttgttaaaaactaaacacttgtcctcttgtatcttttttaaaaaaatatttcaagtaagtttcaacagtatgctgtgataaggatgaaacctattaacattatccttggtatatattttgattttctgttgttttcttaatcttatattgtcagtatggtttctaagatctaagatctccataagggtaagtgataattgggttttgataaatcataaggaatcttctactagaaatatgtctgtttatttattgtacatcaggaaaagattagtttactttatgccagaagataatgtttgggcctaaatcttaatttttctatctagtgttaatacagtagaatgcctaaaggatatatagaagaaaagacaaaaaaagaagatgaagagaatgcatcattacagactgaatcatcagtccctacagaaggggaatttgttctttcaaaagtagaatttcagcagccgggcgtggtgcctcaagcctgtaatcccagcactttgggaggcagaggagagcagatcacgcggtcaggagttagagactagctggccaacatggtgaaatcccgtctctcctaaaaatacaaaaattagccaggtgtgatggtgcatgtctgtaatctcagctactcgggaggctgagcaggagaatcacttgaacccaggaggcagaggttgcagtgagccaagatcgtgccactgcactccagcctgggtgacagagcaagactctgtctcaaaaaaaaaaaaaaaaaagtagaattcagctgggcatggtggctcacacctgtaatcccagcactttgggaggtcgatcacatgaggccagaagtttgagaccagcctggccaacatggcaaaacctggcctgtactaaaaatacaaaaattagccaggtgtggtggtgcatgtctgttatctcagctactcgggaggctgagcaggagaatcacttgaacccaggaggtagaggttgcagtgaatggagatggcgccactgcactccagtctgggcgactgagtgagactccatctcaaaaaaaaaaaaaaaaaaagtagaattcatgggaaaaattatttgttgctatttagccttatttttaaatatttcagtatattgtctgtttgatacatatgaacaatctgactacaactcattgggaaacaccagtatttaccttaccttctaatgtaaggcatgattccaggtattttctcatacctcaaaccttaaatctctaatttagtcccagaaacagtattctacatgtcaaaacgttttttgttttgttttgtttttggagacaagttctcaccttgtcaaccaggctggagtgcagtggcgccatcatggcttactgcagccttgatctccctggctcaagccatcctcccacctcagcctcctgagtggatggagccacaggcatgtgccaccagaccggcttttctgttttttaatttaatttaactttttttttttttttgtagagacagggtctcactatgttacccaggctggtctcaaactcctgggctcaagtgatcctcctgccttggcctcccaaagtgcatgagccagtgcacccagcctcagaatatttttaaagatgaaaacctaatgctcagttaaacttttataagatctatgtgcttctaaataagtgtaaagatgactattttctggatgttgtattggtggggaagatggagagatagaagaacaagtgtttattctctggttgtattttctctctctctctcttttttttttttccttgagttagagtcttgcactgttgcctggactggagtgcaatggcgtgatctaggctcactgcaaccttctcctcccaggttcaagcaattctcctgcctcagcttcccaagcagctgggattacaggcgcctgccaccacgcctggctaattttttgtatttttagtagagacagggtttcactatgttggccaggctggtctcgaactcctgacctcgtaatctgcccaccttggcccgccaaagtgttgggattacaggcgtaagccactgtgcccgacctctggttgtattttcaaaatatatccaaataatattttaaaaatgtatttagtgagcactagattccaaaatagcaagagcaatttcagcaaagtataattcctagagaggaatcctacagtacctcgttttgccttttttgttctctaggtcatgtcaggatgggagcataactgacctggccctagttcctaggaggagcatgtgccctctaacatgtgcacagaaggataatagggtcagtgggatgaggagaccaagtgactaaagcagatctgagaatctgagctgtaaaggatttggaggtgggatggagggataaaaccttagtgggaagcagacagcagatagagaagatataggataaactcacggaaggtgtaagcaggttcatgattttaaaattagcctattaagaggttgtgttggaggtctgttttcttagtgggggcaaagtggcaagggaagtttcacttctgaatagggtggaaaatgaagatataaggaaagaaagagagaaagaggaaagacgtattaggcagtgtgaggcagagaaagagaagagtgggagaaggaggggagtcagactttccttggctggaggcaaactgaccaatgcccgttgctgcccctttccaccgcagggttcatttggtgaaacctggttgtactgaacctttaggagagccttgaagtaaaaaagaaatcccagacaggtcagtggcggatgtaaatgtttaaggaagaacagacagtcagctgtagaaatggagggaggggtagagctgactggagagcgatttatggatggtatatttcatgaggcttgagtcttttttagcactaatagttggcgtcagcttcacctgttgcctccatgagtcatgccctggtagcagaggatggtgggccaactgccaagccatcccctgaaggaccggctgcctgggagtgaggaaaggtggttgatgggctctgagacagcaaggtacaaactgaaatggggtgaaaagagactgtcaaaataagtatgggctgatttgttctaatatatcataggttattattagatgctggaagagtaaaatggaatagaagatgaaaaatgtgaacctttatcttgattccattttaaatctcctaaattctgaggagctttgcaattcctcttctggatataaatctgccctacagtagagttgcaaccttggataaataaataaatttggcctccctgagcctctgttttccctgtaaatcaggactaacataatctacctcaaaggattgtgttgaaaattaagtgaaaacttacataaattatgtagtgtggtggggacatatgataggtactgtggcctatccttaggagggatgaggaatggaactatttttaaacataaaaggtcaactttatatgctgccatataagtaacccagtgcaattggagcttgaatcaacagggctgggagaaagcttacagagtgtgcctttgaaatcccaatacccagtcatggtgatttatgagaccttaccagcttgcatatgtgatggcccactgagtttgtttactttagttttagctcagttacccagcactctatgatagcctattttttatttacactctcactaactcctttattatgatttctttgaaagaatatgaagacagccataaaaaagactcttattgaagttgagagggtctcctgtaggtcttcacttcactgtgtctaaacattggtctgttgcttgtgctttgcttttctctcaccctggatgaccttcaaggctcttccaaatgatttctctgattccctgaaatactgaaattgtgattaacagaagtttcaagtgttaatcaatatcaagatagtagttgtctcttcctggggaaactagaaatgaaaaccaaacataggcctctgtaatcattgcacagattaaaaatgaaaatgcagctgagaaacagaggaatgaatgagaaaaccctaaacctagttctagccccaggatgaggtctttgtcatgagtctgacgctagccacagccggtaagagaaggaattccctagtagtgtagttgttacaagggaatgagtcattttgcaggtaattgttcttcttccattttccacttgctgtcagccactttacagaggagtcggactttgttctgcttaagagaagtctctttccttttattgtttaaaaaaaaaaaaaaattccagaagcccttagaaagagatttgtgagatcaactggtttaccttcttcattcagatgaagtaacaaagcacagaaaagttattttgtcaaggtttctgtcttgtagcaaatacaaactttctggtgttaaacatatgaccctgatttgggtctttactgacatcatcacttttttttttttaattttctgagacggagtcttgctctgttgcccaagctggagtgcagtagcacaatctcggctcactgccacctccacctcctggattcaagtgattctcctgcctcagcctcctgagtagtgggtataacaggtgcatgaccacgcccagctgttttttgtgtttttagtagagatggggtttcaccatgttggccaggctggtctcaaactcctggcctcaagtgatctgcccacctcagctttccaaagtgctgggattacaggtgtgagtcaccacacccggccaacatcatcacttttgaatgaaatttttagtttggtgatgactttattatttgtatttgatccttgtccatttttctctagatctggtactaatttcatgtggaaaataaatcgttaggaggttttcattttgtacgttttggctgcaaacaaccacaacccagtctttaggttttcactgagggatttttgttttagcccaattattgtatgacatgtatctgctccagaggttcttataggtgaaatgagatttttatgtatctgtattcaaacacatagatagatagatagatagatagatagatagatagatagcgaaacatatagacatacctctgaaaatacaaccagccatataatgtaagcctgttgtgtgttaatgaatgatagggtaataatacattatgttcctgtcctgtagaggagttcgagtattcaatacagaggaccagaatgattggtcccagaaaaagtgctccttaagctggatcttgaatactgaggatttatataggcatctaatagggaagaggtggtattccaggggctggataaggcagggtaggatggggtattcatgtggattcgctttattgtatgtttgctggagaggagggtagtgggcattctggaggagtgagcctctctggaacagaggatgtgattataggaccagtggcaggtgtgagaaatgtagattgaggccatactgcagactgtcttaaatgccaggtcaagccatttgcacattgtcctataattcatgaagaacccttacatttgactataaggaaaatattatgaagaaactaaaataaggtgactttagaaggttatatctggtggtagtgtgcaggatagattatatcaaggggaaattgtactgaaagcaagaagaaaccgttagggaattaggtgtaagagtgataagggcctgaaataggatagtgatgaaaagagaggaatgagtaggagaaagattgcacagagaagggtgacagcatacataagacttggcaggaccacagccagaagaaagcatgaaattctaaacctgaataatggacagaattatagttggaaaatcatgaagagaagccagttgggtattgggggagggctggacaatatgacagttaagtttttagacatataatttaggtaaggctatgtatctaagcggaaatgccctataagctttcagttgtcaggactggatttctggttaaaaaaaaaaaaaaaaagagggggcaggattttacttgggtgttgtctgcaaagttgatagctaagaccttaaggctcatctgtgaaacgggagtgacagtgctcattaaaggttattattagaaataaatgaagtaattccaggagagtacataggactctccttgacacatagtagaccctcaataaacattaggttttattattgtttattatgggttttagggaacaacacttttgtgaattattagaaccttatttgggaagctataaaagccatctgcgtgatgtgttttcttagtacaccaaatggaagttcatatgttccattcatatacatgcttccctagctgttaggggaaggtgatagcgcatgtttaactgttgatcactgtttgtaaggcttttcgtgttttttacatatttggttaaggatcttaatccttgagctgtattttgttctcatttgtttgtgtccagagtcaaattaagtttaaggaatttataaagagcttctttgcaagaatgatattaactcaatgtactaaagctacattcacccaaagtgtaatagacttacacaacatggaagaaatccaggagaggcagacagttattcatgaagagtggtagtattcctgtctgcctgtctgtacatttgtcagatcagtgcattctgagaaaattatgccaatttgaaatctccaaaagcattctcagccagtatccgtgattctgatagtttacaaactgttgatagcataagctgttaggaagatattgtagaaattttaatgcagctgttttaattagattgctttccttataacaagtttcagtgtttctggtcacaatacaatttattagctcctgacacatgacactgctggatcaccaaccttaactctgattctctccatacaacccagtatccttaagtaaaatgctgcatatttcattgctggtaagagaggcagggccaagattcgaactcacatgaagccaactagagaagcctatgctctacactattttacatctcataattctcatacactactaacctgttgcaaatgaaaaagaagtcttattattgtaccacttttaattgcacttattattgccttcagtaaagtcttcatttctaaaatgtcttagtaaaacagtaatttcataaaaatattgccaactaggagtactaaattctaattttggttatattatgcggccttggataaggaagtttcttaggctttcatattccaaattattggactattctaaaaacatttttaatattttgatggatgtagtctattctaatataatgtctttcaagtgtttgaaagttactacttattcaaaactcaactgtctggcagcttttcttatcctgaactctgtgaagaacttcggggacaggaggtaaaatgtctttgaagagtaagaaatccaaaacttcatgtatttacatgttctggtcttgtctcataggattcttctttctccttacataccctcctttaaatccgtacctcccccggtcttctccatcttgcaaatggcaccaatgtccatcctagacattgatcatcccagaagtctaggagttgattcttctcatttcttcagttctgttgtgcaagtcttcaagtcttgtcagttttgcctcaagcacttttacaaactatcctctacagagacagctttacaaaatgtaaatcacatcctatcattccctgctcagaaccttctaatggtatcctcacaccctctggaaggctcataccctcaggacccacgtgatgttgccttgacttgcctcggctctcattccgtagacctgtcctccctcagactggctgtgttactcagcctttgttgagagtgctgtgccccaaatctggttggcttattctaggcattcgagtctcttcccaaataccaccttctcaagtgcagcttttccttactacttaattttatagtcccccatcaatgtacgatgttaccctcttttccttcattgagagtgtttgtaatttttttttgtctgcttgtttattgtctttttgccccataagtccaaggtttacatgaacagggaacttgtctgttttgtttattactgtatcccctatgctggcacatactatgtaataagtgtttgttgagtgcatgagtgaataaccattctaaaaaactctgatgtttaaagccctttgctttatataagaattttacttggaaccctggtatttttgtttgtatttgtttgttaataaatgtcaagagttcagtagtaagataggtttcagaaatgctaagttaaacagaataaagaaagaatatgtattacaggtcctggcagagccttgaatatgctaacatttgacagtgggagtctttgagaattatcacatgaagctgctgtacattacaacacattctaggaaatgctgtcttagacaaaaacctgtcatattagaattggggtaaggggcacgatactgaccgtgaggcagcagattcctatggactacattaaaaaaaaaaaaaaaaaaaaagaacagactgataatctagggctcagaaaaaaaaaaaaactgtgatatgaaacagtggcaaaaggattcaaaaagaatacagcggttgggactatctacttttttaatttttttattacactttaagttctagggtacatgtgcacaatgtgcaggtttgttacatatgtatacatgtgccatgttggtgtgctgcacccattaactcgtcatttacattaggtatatctcctaatgctatccctcccactcccctcaccccacaacaggccccagtgtgtgatgttcccccatcctgtgtccaagtgttctcattgttcaattcccacctatgagtgagaacatgcggtgtttggttttctgtccttgcaacagtttgctcagaatgatggcttccagtttcatccatgtccctacaaaggacatgatgaactcatccttttttatggctgcatagtattccatggtgtgtatgtgccacattttcttaatccagtctatcattggtggacatttgggttggttccaagtctttgctatcctgaatagtgctgcagtaaacatacatgtgaatgtgtctttatagcagcatgatttataatcctttggatatatatccagtaatgggatggctgggtcaaatggtatttctagttctagacctttgaggaattgccacactgtcttccacaatggttgaactactttacagtcccaccaacagtgtaaaagtgttcctatttcttcacatcctctccagcacctgttgtttcctgactttttaatgattgccattctaactggtgtgagatggtatctcattgtggttttgatttgcatttctctgatggccagtcatgatgagcattttttcacgtgtctgttggctgcataaatgtcttcttttgagaagtgtctgttcatatacttcacccactttttgatggggttgtttgattttttcttgtaaatttgtttaagttctttgtagattctggatattagccctttgtcagatggatagatagcaaaaattttctcccattctgtaggttgcctgttcactctgatggtagtttcttttgctgtgcagaagctctttagtttaattagatcccatttgtcaattttggctcttgttgccattgcttttggtgtttcagacatgaagtccttgcccatgcctatgtcctgaatggtattgcttaggttttcttctagggtttttatggttttaggactaacatgtaagtctttaatccgtcttgaattaatttttgtataaagtgtaaggaagggatccagtttcagctttctacatatggctagccagttttcccagcaccatttattaaatagggaatcctttccccatttcttgtttttgtcaggtttgtcaaagatcagatggttgtagacatgtggtattatttctgagggctctattctgttccattggcctatatctctgttcttgtaccagtaccatgctattttggttactgtagccttgtagtatagtttgaagtcaggtagcatgatgcctccagctttgttctttttgcttaggattgtcttggcaatgcgggctcttttttggttccatatgaactttaaagtagtttttccaattctgtgaagaaagtcattggtagattgatggggatggcattgaatctataaattaccttgggcagtatggccattttcatgatattgattcttcctatctataagctttgtgtcctcttttattttgttgagcagtggtttgtaattctccctgaaaaggtccttcacatcccttgtaagttggattccttggtattttattctctttgaagtaattgtgaatgggtgttcactcatgatttggctgtttgtctgttattggtgtataggaatgcttgtgatttttgcacattggttttgtatcttgagactttgctgaagttgtttatcagcttaaggagattttgggctgagatgatggggttttctaaatatataatcatgtcatctgcaaacagggacaatttgacttcctcttttcctaattgaataccctttgtttctttctcctgcctgattgccctggccagaactttcaacactatgttgaataggagcggtgagagaaggcatccctgtcttgtgccagtgttcaaagggaatgcttccagtttttgcccattcagtatgatattggctgtgggtttgtcataaatagctcttactattttgagatacatcccatcaataccgaatttattgagagtttttagcatgaagtcctgttgaattttgtcaaaggccttttctgcatctattgagataatcatgtggtttttgtctttggttctgtttatatgatggattacgtttattgatttgcatatgttgaagcagccttgcatcccagggatgaagcccacttgattagggtggacaagctttttgatgtgctgctggatttggtttgccagtattttattaaggatttttgcatcgatgttcatcatggatgttggtctaaaattctcttttttttgttgtgtctccgccaggcattggtatcaggatgatgctggcctcatcaaatgagttagggaggattccctctttttctattgattggaatagtttcagaaggaatgttaccaactcctctttgtacctctggtagaattcagctgtgaatctgtctggtcctggactttttttggttggtaggctcttaattattgccttaatttcagaacctgttattggtctattcagggattcaacttcttcctgatttagtcttgggagggtgcatgtgtccaggaatttatccatttcttctagattttctagtttatttgtgtagaggtgttattctctgatggtagtttgtatctctgggggattggtggtggtatcccctttatcattttttattgcatctatttgattcttctctcatttcttctttattagtcttgctagtggtctatcaattttgttgatcttttcaaaaaaccagctcctggactcattgatttttttgaaggtttttttgtgtctctatctccttcagttctgctctgatcttagttatttcttgccttctgctagcttttgaatgtatttgctcttgcttttctagttcgtttaattgtgatgttagggtgtcaattttagatctttcctgctttctcttgtgggcacttagtgctataaatttccctctacacactgctttaaatgtgtcacagagattctagtatgttgtgtctttgttctcattggtttcaaagaacatctttatttctgccttcatcgcattatgtacccagtagtcattcaggagcaggttgttcagtttccatgtagttgagtggttttgaatgagtttcttaatcccaacttctactttgcactgtggtctgagagaaaatttgttataatttctgttctattacatttgctgaggagtgctttacttccaactatgtggtcagttttggaataactgtgatgtggtgctgagaagaatgtatgttctgttgatttggggtggagagttctgtagatgtctattaggtccgcttgttgcagagctgagttcaattcctggatatccttgttaattttctgtctcgttgatctgtctaatgttgacagtggggtgttaaagtctcccattattattgtgtagaagtctaagtctcttagtaggtctctaaggacttgctttatgaatctgggtgctcctgtattgggtgcatatatatttaggatagttagctcttcttgttgaattgatccctttaccattttgtaatggccttctttgtctcttctgatctttgttggtttaaagtctgttttatcagagactaggattgcaacccctgcttttttttgttttctatttgcttggtagatcttcctccatccctttattttgagcctatgtgtctctctgcatgtgagatgggtctcctgaatacagcgcactgatgggtcttgactctttatccaatttgctagtctgtgttttttaattggaacatttagcccatttacatataaggttaatattgttatgtgggaatttgatcctgtctttatgatgttagctggttattttgcccattagttgatgcagtttcttcctagccttgatggtctttacaatttggcatgtttttgcagtagctggtactggttgttcctttccatgtttagtgcttccttcaggagctcttgtaaggcaggcctggtggtgacaaaatctcagcatttgcttgtctgtaaaggattttatttctccttcacctgtgaagcttagtttggctgggtatgaaattctgagttgaaaattcttttctttaagaatgttgaatattggcccccactctcttctggcttatagagtttctgctgagagatcagctgtaagtctgatgggcttccctttgtgggtaacccgacctttctctctggctgcccttaacattttttccttcatttcaactttggtgaatctgacaattatgtgtcttggagttgctcttcttgaggagtatcttcgtggcattctctgtatttctggaatttgaatgttggcctgccttgctaggttggggaatttctcctggataatatcctgcagagtgttttccaacttggttccattctcccatcactttcaggtacaccaatcagatgtagatttggtcttttcacatagtcccatatttcttggaggctttgttcatttatttttactcttttttctctaaacttctcttcttgcttcatttcattcatttcattcatttcatcttcaatcactgataccctttcttccagttgatggaattggctactgaaacttgtgaatgcatcatgtagttctcatgccatggttttcagctccatcaggtcatttaaggtcttctctatgctggttattctagttagccatttgtctaatcttttttcaaggtttttagcttctttgcgatgggtttgaacatcctcctttagctcggaaaagtttattacccatcgtctgaagccttcttctctcagcttgtcaaagtcattctctgtccagctttgttccgttgctggtgaggagctgcattcctttggaggagaagaggagctctgatttttagaactttcagcttttctgctctggtttctccccatctttgtggttttatctacctttggtctttgatgatggtgacgtacatatggggttttggtgtggatgccctttctgtttgttagttttccttctaacagtcaggaccctcagctgtgggtctgttcgagtttgctggaggtccactccagaccctgtttgcctgggtatcaccagcagaggctgccgaaccgcaaatattgcagaacggcaaatgtagctacctgatccttcctctggaagcttcatctcagaggggcatctggctgtatgaggtgtcagttggcccctactgggaggtgcctcccagttaggctactcgggggtcagggacccgcttgaggaagcagtgtgtccattctcagatctcaaacttcatgctgggagatccactactcttttcaaagctcagttggaaatgcagaaatcacccgtcttctgcatcactcatgctgggagcagtagactggagctgttcctatttggccatcttggaacctcccccagctatacctactttattggatttttgtgtctccatcagctgacatggtacttacagcctagaatgagcatacaaaggatactcattcgctattcgatgatgactgacaaacagtctcccaggatcaccatgaaataactaaactgagtttgatttatttaaaaatcaggtccaggtaacaaactgcacctgtccccttgaattgatacaaataaaaataaaacaaaaaaggacaatattttactttatggaactttttattacaaagaattaaaaaaaaataaaataataatacttaaaagaatactttgactattattttatcacctaaaggcttctcttattattttatttttggagacagaatctctgtcaccccggctggagtgcagtggcgcgatctcagctcactgcaacttctgcctcccgggctcaagcaattctcctgcctcagcctcccgagtagctgggattacatgagtgcaccaccacaccctgctaattttttgtatttttagtagagacagggtttcaccatattgccgaggctgatctcaaactcctgagctcaggcaatctgcctgcctcggcctcctaaagtgctaggattacaggcatgagccacagcgccctgccaacctaaaggcttttcacaactgggaattcactgaatgttgtatcattaaagctaatgtggaccttggataactgtatgcctattttctgggaaataatggtggagctctttgaaagggtaaaaatggtgttttatcatacataactatgcctgaggtttttgttttgcatttatctttgggcaaagttgtaaagttaagcaaatctggaattgaaataatttgataacatcagctaatatttttcaaagttagatttttgaggtataatttacataagagttactctttctagaggtatagttgaatgcattttcacaaatgtgtacaattggataaccaccaccataatctagatatataggtaatgtgtaattataatatatatgtactatataatataggatatttataccacccaaaaagttttctcttgctttttatagtcattccccaaaccccacgtccagtgctgattgtccctatggttttgccttgccagaatgaataatacattaaagatatagccttttgtgaatggcttctttcacttacaatacttttgagttttgagttgaattataagtttcacttataatacattttgtgttattgcatctattggtaatttgtttcattttattgctttttagtatttcatttttttccagtatgtcattttatggacacaatttgtttacccattcaccagttgactgatatctgaactgtttctgggtttctgctatagagagttgctataaacattttcatataggtctttatatagacatatgttttcatttctcatgggtagatacttagaagtaggattgctgggtcatatggtcactctactttttaactttataagaaactgtcaaacctttttccaaagtttctataccattttgcattctcactagcaatgtatgagaatttaatttgctctgcatccaggccagcattttgtattgtttgtattttgtattttatacattctagtaagtatgtagtgtggcatctcactgtggttttactttttgtttccctaatgtctaatgatggtcgtggatcttttcacatgcttattgatctttttgattcttatgaagtgtttgtttgttcaaatcttttgaccatcttttcactggattgtcctcttattgtgttgtaaagattttttaaaaaataatttctggatacaagtcctttatttgatatgcattttgtacatattcccttctcaagtctgtggcttgttgttctgttttcttaacagtttttttcaaagagaaatttggtaaagtccagtataccattttttattttatgcttcatgcttttgtggtttaagaaatctttgcctaacgcaagatcacaactactttctactgtgttttcttctagaagttctttagttttagattttacatttagttctatgattcatttcaagtagatgttagtgtggtgcaggataaaggttgaagtttcttgttttatgagtggatgctcaattgttcaagcattctttgttgaaaagaatatcatttctcttttatagctcaaattttattacttaaaattattttaagatgcacatattaaagtgatatgtgtaaaagattatatatttctggaagcatgcctatttacactagttattattactttaggagacagatattctctttgtttaaattgtttccacaaagcataccacgaagtacagaggggacattagtaactattttatgatgattatggtattcatttaggccaatttaagtgaattggagatcctaattttctctataaggagacaatactttttcatacaagattatttttgtggaggcttcatttatgtgaagtttttgcacccatttattgtcatgattattcttcagtgaaacaaaagtctgtagtagatatgctgctgctgctggttttaggtaaattgactaaatagttatacaaaactctgtctctaccatatatgaattcaaactgtatcaacaattacagaatactatgctaacatctaataagagagttagcccatgtagaagagaaatataaatacagctatcagatcagtctcatgttatttcagcttcaaggagcctcttagcaaaaatggtttcctttctccatacatgttgcaggtgtttactattttaaatgagacttttttgttaaaaaaaaattaaaataagatcatttagagaacgattctcagcttgttcagatgattatttggttttaaaaaagcagcctggagttcctcttaatctcaaatctccataaaacttacaagagatgttttcatttactgaaaggaatagttttttcttaatcaaatgtagagccattatcactagagggcagtaaatacaaacagatttagtggatttactggcactaacgatgttttcagaatactagcattaatcaaagaaagtatagtttttataatatgaaaatacatgtaacattctgttatgtaaaatattggttatgaatcaattctagattattgtctgcctctaaaatatttttaaggcatttgaaagcaaagggaggctgagaaacactagttttctgtggctattctgtttaatacttgaagtttaactttgcctcagaattcttcaagggacatttaaaaattagatttgcatttgttcaagctgaacagtactggatatatgagagaccacgttatatagatttgcttcttgattaataactaccacgacttttaattttaaggtgaaaggtgtaaaataaatgtagattgattataggataaaatattttccaataatgtaagtcctactgcaaacagtgctactgcctggaaaactccttatgttggagaggtccaagagctaatacacttattttaaacaatatttcttaaatatttcaaacacagtaatataatatacagcttagaattgattatattaacggatctattatgtaggctctaggctaaatataaaataatgcctgaaatagttttctttttttggcaatttagagtactctgaaaccagacagtctgggttcaaatcctggccctgttacttactactggctttgtgaccttgagcaagacaacttgacctctctgagccttagtttccccataatttagttttgtttttccctattcaaaaatgcatcttttctctcttgacctctgttacaaagtcaataatgacagcatgtgttaatgtatcagcagttcagctccatcagcagaatttcaaatatcctgaaatgtactgaaatagttcaaaaagattgttaattgcttgggtatctggtaaggactgagaaaacaaggaatagcagggaagtggcctctagaaattctgaggggtatttctaggaaaagtctgaaaaagagaactaactgaacattatgggaattttttttttcttttttgagacaaggtcttgctctgtcatccaggctggagtacagtggtgcaatcatagctcactgcagccttaaactcctggcctcaagccatcctcccacctcagcacctcccacctcccacctcagtagtatctggaactacaagcacatgccaccacacctggctaatttttaaattttttgtagagacggtggtttctctatgttgcccaggctggtctcgacctcctggcctcaagcaatcctcccgcattggcctcccaaaatgttgggattacaggcatgaggcacttcaccaggccaagaaactattttttctatttcaacaaacacacttgcatatatgtatataaaatcatttgggcatttgagagcagtggattacagataagaaacctgagctctagctgtaacgctgtccctcaagttgtgttgtcagaacttttctggacctcagttccttgtctgaatgtgtcgtcatcattacatctgcatatgagggcagctgtgtgttgttcacatagcgctcccaaacataagcgtgtctcactatatggcagggctgtctgcctgtgggcacctgcttcctcaccctgtccagagatctgaccatggtgatagtaaccatgattctttaattcaaggcactgtaaagttagcaaaaagattgaggataaacaaatccactcctagattcatactgtttatcatagagtttgcatcagcctaattatatgatgagctgtcatacaccattaagagcaaggactgggtttgcatttcaatcctgtcacctatggagcaagttattgaatatgtaagaaggtccatcttttcatgttaaaatagggataatatttatcttatcagaatgttgccaagattagaaatgaggtatgtaaagttctttgtgcatagtaggtgcctagtaaatgttgtaacttattaaagtttcttcattaaatttggtgaagccaagtctgactataagaattgtatctctctggctctattcaaatttctcttctaaattatctagattctctctgcagatagcagctaccgtggcaataggaaggagattctagtctcctagaaatggagattagggaaaatgaaatgaattttaatttggctcagagatttttgaaaagatttcttattccctagaaatatggaaactttccttggtactttttactcaatatgattaaataatctcccttattgcagcaaattagggacttatttgaataagttaaatcctttcacatccagcacctattagaatgcctggcacataatagttgccaaatagaagtctgttgaatgaagggaccatcactcacattcagcagggagaagaggctgcagattttagagggaagggaaactgtatgtgtgtttctgcataatgttttaagacaaggagtattatctactatatgtaatctgttttaaatgtttttgatgattttgctgagggtgaaaacccttgtcctttcctgtcacctataatcagtataaaaatattgatgttttgcatctgcatcagccaacaatctttttgtggcaatagtacactaccttgagaaatacagggacataataagatacttttctggcctcaaagatcctccaccctggatgaggagtcaaagttgaagacagttgaaaaaaatagaacagtgattcttaacactggggaacattcaggaaatttcaggggacagtgactggggagtactcctggtgcttggtgggcagaggccagggaggctagatgtcctgggatacatgggacagcctttcaccagggaggtttgctgtgtgtcccacacaacttccaaaaagtcccagcagctattcacataggtgaaaaaacaaaatgcatttataattctctgagcctagaacccaactactttttacgtataagtattaaatatttttacatggttttaatccacaccaaattttctagtaatgcagcaatagtgtatattgtgaagatggcactttgttacatttgaaacctttcaaagaatcattcatcatatcaggaaaaaggaaaatttttctaacataacacccctgtattcattttcatgctactgttacttttgtggtaattctccccataagagaaatcatagcaaacccttagatagcacttactgttctaagagccttatgtatatgcactaatttaatcctcacaacaaccctgtaaggtagaaactattattctcattttccatgtgagtaaactgaagtatgggaaatttaaatagcttccccaaggtcacacagctaatcagttatagtagtttttgactactttttaaaatgtagttgtgtacaagtatttatattttgtagtatttgatagaaattactcatttctcctttatttcactgataagccattatactgattttttttttaaatctatgtagggagtatttagcctatatgtattcagtacagtattatgaaggaagtgtatttaggaatttcatttcaggatgaatacttgttataaaaagtaaaaagtaactgagtcttaagtttgtcaaagaataaaattgatggatggatggatttttttttttttaaaggagggggaaggcagtgagcctgactgcagagtgtaatttgcatttaaatgacaagtggtatgacacttccacctgttcttcagggagcctcaccaagtatgttttgcctcgaggcctttgcttttgccattcctcacttggttttcccttctctaccctacctctcaccccgcaatccacatggcttgtttcctttcttcagatctcctggtatacgtcatctcatcagaggggctttccatgatcaccttatagcaacctctatccgtaatccttatcccttctttctctccattgtgcttatcaccccatgacgtattatgtatttattaacttagttttggaatataagctgcaggtgagaaagctttgtttctctttctcaggcagtgcctgacatagagtaggagcttaataaatattgaatgaaggggcagatgtagaatcgttagaatttggaaaaaggctggaatatttggtcctaagatgtactttgaatgatttaaatctgactgagaaaaccagtttgaggttggcagagtagaagaaggagggtattttaggccgagaatttggtaagacagagatgggattgtcagctgtatggtgaaggtggaggaatactagtctttcaggaacagagcaaatgtaatagagcagctgaaaataggcttggcgttggggattaaggtcagatatggcagtctggaatttacagagggatgtgatgaagcaggcattactagctttgaagtaacaggctgcggctggatttgaggaaaattgatctggcagtagaggtcaatatgagactagaaggggaaaagccaggggcaagaagatgagctaagaagcaattacagcattttggccctgagacatggagtgctgtgatgcaattgaaaggaaatataacatatatattttaaaaacaaatgacaaaccagagaatttttttaaatattagtataatagaatgattatcataatgatcattgtcactgtcatctttactgtctgatacctacttatcttcaactttgtaccatttgttgttttaagtgctttgcatatatggtctcatttaatcctcatatgtatctgttctggttatttattgctatgtaagaaatcacttcaaacctaatactttgaaatatgaatgtatttttattagttttcatggctttgtgggttaactggtcttggctagacattcttgcttggcattcctcatatggttgcagcccagtgggtagctatctgaaagctgaactggctggatggctaggatggcttcttgcccctcaggtctggctctgggctggggtggctggcattgctgaagactggccaggcatgtgtgctctttcttgtgcaagtgctctcttgcgctttctctcttcactgtctgtgaagttaacatggacttcttgtagcatagcctctcagagtagtcagacctttttttttttcaacctaatggcttaggggtcccaatagcacattcaaagaaagcaggatgagagctgcaagatttcttatgacttagcctcagcagtcatgcaccatcacttgttggttacacaagccaactcagattcagtgtaggacagtgtggctcattaagagtatctttggagactagctgccacagtaatccactttacagatgaggaagctgacacactaaaaagattatttgtcagtgattgtgcacaaaagatttaaacttgcaattcttgttctcagtaccagagtgaacctgggaaaatcattttttctctctaggtctcaactttatgtggaaatgagggagttagagggggtgatattaaagttactttctatttctctcagtcttttaaatatttggattcagattacgggaggggtaatggtaaggaacaaactgaaagaaacagctctggataaaagatagggcttgctaacaaagttgaatgaaggagggaaggtgatgccgtataggggaacatgccgggttactcaaggattcagctagatggtttatattaaacacctgacagtgtctgacgcacatgaaacacctgttgaatggtaggaaagagtcatagattccatctgagatactggaagaaatataggctcactgactgaaatggaagtaattatactaagaactactttaaatagaaaaatgtctcacagttttgaaaaagtttgtcgtgactagcagggcattcgagaggagaatcttgtattcagaaatatggcactgaagttcaagttagaagtggtcattgaagattgtgggcctagggaaaattaaagaagttcaggatcctgggagttgagggagagtagtaggaatgatcaaacatgtggaacacttcagagaagtagggagaccagagaaaaggaggaccttagtattcctctgggggtagctttagtggaatgttggagctttaatttcttccttttgtagaggagtaagagtgatggaaatgaatacaacagatgttaacaaaagcagaggactgtagcagctaaaggccaatagaaactcagagagacacagtgttacaggagtgcttatcagagagcatgctctctaagacagacatgccacatgtggaaatagttaaatgtcaggaagactgcagagtagccataccagcaagttaaagcacagagtagtaagcacaggctttgagatggagaggaggtaaaatgcacagaattatatgctaaaatcaactaaaacctagtttttccttgtttctcacccacaagacctctttagtattaaagttacagggtaatactacaccaaaccaaatagaaaatgctgtttttctagaaagaactttgatttctcatttaaccctcctcgtaaaatgtctgattactcttgagctcaattctggattcctaagagccactcattcctttcttaactttgtgtacagttattaaaatgttctgttctggctgggcacgttggctcacacctgtaatcccagcactttgggaggctgaggtgggcagatcccctgaggtcaggagtttgagaccagcctggccaacatggtgaaatcccgtctctgctaaaaatacaaaaattagccaggcgtggtggtgggcgcctgtaatcccagcttctcgggaggctgaggcaggagaatcgcttgaacccgggaggcagaggtgacagtgagccaagatcgcactactgcactctagcctgggcgacagcgagactctgtctctaaataaataaataaaatattctcttctgatcaaaatacagatcctgagttctatatacaaaacactgcattccttatgcatacacagtgccctagctttcacatttccctccccccagaattgcaagtggtcccacccctagattttgaaggttttagaactctgtcatacataacaatagaaacaaaaggagctgagagcagccatgccacacaggtgagggaatgtgtcattgccatctgtgccatctgtgaattctggacattagtcgtattgtttaatccctatgcttttatgttggatgaggggagaactacagtcatttctacatcaccagggagccacttgttttggatttgagagagggaagcaattaaaatgctcgattgccatttttggagcagtttttatttggaaggaagggaagccagaggacattaaaattcatagaaaatgccctccaaaaggatgggcaattcttaagaatgaactacgaattttgaggagttttatggtcattattcatcactgcaagagggaagccccgttcatcttttctcagggtggcctcagagctgcagggataccattattcaatggcgtttgtcgggtgaggagaaagcctccccagaggctggcccttgccaaccaatcccaaagcagcctgcaccgaggccacaccccctcgccttataggctaagagctggaatgcaattggtgcagagttggggttttatgggaggggcttcttgtcactcttcccggcttccctgcagttccttatttggtagcttttgacaggactagcctttcttgcaactaagcatcttgacatacattattcattaagccctggagctcgggagagaaagatgcagacccttagatctttagatattcctttatcacgtggattttctttattcagaatagttgctgaattttgtgccattctggagtcttacaaatggcatgtattcgatgggaagacggctggatgggatttaatgcgaggctttcttatgtatacttaattaccaaaaatctttaaaaactcatactctgcgtggcttgtggaggttgttaaagtgtcgagattttgaagctaaatacattttagagcttactatatatatacatatatatatatatacatataatcaatcaaaaatgcctgaagcaaactatttactgtcagtgtcttggggctacataaaggtaagacttacttagcttttgaaaactccttactctgattacaaaattatttagaaagcttagactctactgtaatttgttcaaactatcagttatgtattctttccttacacatgaactaggaagaaatacgtgttaatagtggtcaagataagattgtataactttcatcagttgtagtttgagtgttaaaatagcttttttagatacgcagtagttcttctgtttgtcatgtggtatatgtttgaattgtgcttgaaaaatatatggtaattaaatacattcattgcaaataaattattgggccaaattacttatactgatttatggattccagttagtatgttgcacataaagtttataaaattaatttgtggctgtttctaaaaatctatactactttaacctgacgaggaatacgtttttttcacctttagctataaagccctaggtgacattaaaaattgacattacttaactatgtaagtgatactaaagtgaaaacttgattgtctattatacttgcaaaactgaacaaagtttttattacactgttttgtgaatctcaagaaatgaattaataaacaattcaataagattgtgtccatgcttggcaggctttttccatgccctgtggtaacattagcattgtgatcctgtctccacaatagaaggaggtagaaaaaccttattcagtcctaaatgaaacatcacttcacagatttttggtatttgagccactcgcttgaacctgggagccaatcacaacacattttaaaagattcattttctgttactctgaggatttttcagattggagtgtttgtcgtttgctttgtttctttctttttgaaggacaagttcccctttgttttagagatttacttgaattctaaaaaaattagaaaacttatttcagtcttggttgtccaagtagtcatgattccttacctccctttaaatctgtggatgattcagatttttaaaaatgtttttaaaatatatagacttccattatttgaattttgttagccatttcttggctaaaaatcttcagaaatgcagaaaagtatagagagtaaatataagaagccctcattatccgccagaattcagctcctagcttttagccagctcacaactgatgttatttttgaagggcttcacatttgtactgtgattatgaaccatttgtactatgattatgaacaatattgccaagaatctacatatagaattttagtacgtttctttttgaggaaaatttttcctggacagctttatgtttaatactgtacctttaaaaacatgtaaaaatagcaaatatagatatatttggtcttatgcattttgaaggttttatttttataccatcaatggagtatttgtttaaataactttgaatactgatatctaccaaacttgtaatgcatcacagtgcagcatattcaaatgatttttagcagaatattgtcaggaaaaaataagaaaattttcttactattggacccataccacctccttaaatatatattgggaggatatataatatacccagtagcacactggcgtgatgtagaagtaaaggagattacatttaaggacattttgttttattattttagtttgcttcctgaacaatcttaaatgcctaatgtaaattgaagaattgcagttctgaaaagcaaaatacagtattgagattcaactgcatttttactttcctttatgccttaactgctgtacacagacattctgatgtataatgagaacaaaggattcaaaagcattcacttagaaatcctcccctgtttttttagttgcaaccctaaatctgtgtattgttttcagactacttaggccaaaaacaattagaaattcatcaatggaaaatatttagaggtcacttaaaaaaataaactaaatgcttaaatggttctgcattttacaatcggttcgtttcaaacagcagtttaatgttttgtcccttctaaatatattaattgagaaatatgatgggatttcccagaagaatacattgtattagctttaaatcagtccttccccctttggtaattttatgtagttatcttagtaaatattatataattatttttagatgagagaagtatcacatttttaaatgtttgttgaatgatctagtgcatttttttagtacatctagctatgcactccaaaaccaatttgtgagatcaactaccagttgagaaagcacttatggtaatttttgtggttattcatttagctttgctggactgaaacttttatatggatagcaaaaaaggaaaacaatgttaattccttttagaaaatacccttgtgttataacttaatgtacgcttcagaattatctttaggaaattccttataccgtcttcctagagtagagaagtaattgcttcaaatattgtcttttataattatgttaaaatgaaatgttgacttccttggagtcccttataagccttggtagggaggtgggcatgtgatggaggatttctccaatccatgtttttgtgttttaaacaaaggctggaaagtactctgggaataatgtatatgaccagaaagatgaacatgcaggatgtcacttatctagtctgtacaatatttagattcctttcactggcttttttcttcagttatctgtactaactggctattttggtgaattgtttaagcaaactgccaggaaaattatacttcgttctttatattcttttagaaaaatccaataatatatgtagcatatctgcaggtagcatccacatgttctctttgggcaacataatccttatactagtttgtgtacaagttagaagataaacctgtgataactgggtctctatctatctttatcaatcactcccagaaggcttcccttgttttgctttattgagagaagtgcaaggagggcagcagttcctgtatagactgctgagattctagcaatggtgaaagctttgcctcatctcctatcttttatgaaaaaaaagactttgtcatgaccaggtagttcttaatagcaacttttagctcataacatgaacaattttaggtcaaagagatatttcattgaatgtgtgtttaaaatgtttagcagactcttttctttggaatatgctttgcctaatgagtatatttttccaagtgtgaatttatctgtaaagcaaattttttttaattattatactttaagttctggtatacatgtgcagaacgtgcaggtttgttacataggtatatacatgccatggtcgtttgctgcacccatcaacctgtcatctacattaggtattttgcctaatgctgtccttcccctccctacccgctgataggccctggtgtgtgatgttcccctccctgtgtccatgtgttctcattgttcaactcccacttatgagtgagaacatgtggtgtttggttttctgttgctgtgttagtttgctgagaatgatggtttccagcttcatccatgtccctgcaaaggacgtgaactcatccctttttatggctacgtagtattccatggtatatatgtgccacattttcttaatccagtctatcactgatggacatttgggttggctccaagtcttaagcaaagagttttttaaacctgtgtatgcatgacattttagctgtgcttttgagacatagctatggtttcccatactaatgctattccaaattctttatgggatttgagaaagaggagctagctatttaagtaactatttttatggttataactacagtcaaatccttcatctgtctgacctgcaatgataaaaatcagctattactttaaaaggcccaaaagttatggaccaagtgccagaaagtgagctgggagaaagaactcaaataatattgagcatctactatgtgccaggctaaatagaagacacttctatattagctcattaaattatatgatagcccataatttactcaagaaaatataactttgtaaagagggacagaaaaaattttgaactctattataaatgtctacaaatattcttagaaggcccaaagtttatttttttcagtaggttataagatataatgctgagtgaacacaagcagtaacctatgttctgtataccacctgatgccagttttaaaaatatgtattcacatacaagggtagaaaaaaggcataaaaggaaatttaacaaattatctgtggttatcttccagcagtggggatttacattattttcttttttttggtatagctttctacattttctatagcacatgtacattttataattagaaaggagttataaaaacatatgaacaaagaagtgaatttagtgttcctgagtttgagactaagctttctagaccagtaatttaacaaccagaatttgtactggtcatgccagttctttgtttttttgtttgtttgtttgttttttccccagcatttattttatttttattatactttaagttctagggtacatgtgggaattgaacaatgagaacacttgggcacaggaaggggaacatcacacattggggcctgttgtggggtggggggaggggggagggaaagcattaggagatacacccaatgtaaatgacgagttctttgtttttgactacgctggcatgcgaatacacatttctctcatccaacagtccattgaaatggttgagggttttttgtttgttttgataacagttaaatgcggagttaaaacttaatctagatggtctataagattgactttggaagttatttagcaaacggtatagagttaggccatcttggtatgaattatgcagagaagcaaaataattctaaataattaaatactaagaattatatttcaaacatcactaaaatatacattcaacacttaccttcatacttaaatgagaatttatggtgaaatttcaaattttaaaggctaatctgatgattagagtaaatgcatctgacttttttttgtcaagtatctaatagcagttactctatgtgtagaaaaaatacattgtttctgtatattaaggcaaatattaaaggcttattaaaaggcctcgtcgggttgttttcagagtcaaaggactctgaaatgcttaatgcttaagaaacagctgatgggggtgggagaagtgtaaaatctttgggagatttggatactggtaatgccatgtggtgttggtaggttaattccagtgtttctttcaatgaaataggcactatggcatcagtaataaaaactgtgaagtagattgttgaaaattgacctgtttcctatttagtgacttgggaaaatggtaaattttgtggatgttgagaaacaataagtgttatactcttacttgaaaaacaacttttaaaaggaaacattatacagtatttatttaaatattttacttctccatagtcctggaagagtactcaagtctattaagttttgctttggagtaaaagactaaattttgagcccttgatcagtatatatattcatttctgctaatgataaattaattgaagaaagcattccatgttttattgtatggcaacacttttatgtgctataaattagtttctctcttctctaaataactaataatacatcttaatttttaattcccttttctttgcttatttctcctgattttcccttcagcccttgggagtctaaatttgtgctggtcagtctggtggccatgagccacatgtgattatttaaattaaaagtagttaaaattaaataaaattcaaaatttggtttctcatttgcactagccacatgtcaaatgcttagtaaccacctgtggctagtgactgctataattggcagcaccgattatggtgttttcccctcattgaagaaagttctgctggaaggcactgttctaaattgtcaggacaacttaaaaattctttgggcatatcttcctgtatctcagagtatgcatatatatttcacttaaactttcctcttctattatttcattttacttttctgtttttcagtttaaaaggatgcttaatcgggagctcacccatctctctgaaatgagtcggtctggaaatcaagtgtcagagtttatatcaaacacattcttaggtgagaataacaacatgcaattaaatttttttcttcagttgtttgcttgtttgtttttgtaggaggattggggtgccaactcattttggaaaccaaacaagtgttagaagttctatttgttttcattcgtcatattaataattcgacactatacgcctctgagttttagagttgcaggtgacaaggtacattttcttagttttatttaggactttaggaattcttgaattaagattatatattgccattttttcatagtaccaaactgtaaaatatattttatagagaggtctattcatatcttcaacaaattcttattaaatgccagccattgttgggcaataggtgtttaatgataaattagaaatgattcctgccctcgatgaatttaccgtcttgtgtacatcaagcctagtaaactggtgggcagataaaatacaaatgctaaataaaagtttgctaataatagctgagtttggtgtcctgggacaactcttgtacctcatccacagaaagaaaatgcagtaaataaaggtcagtaatttgaatgtatcctggacttactttcaaaacaaaattgctgttatatatagttaacatttattaaacacttagaatatgttctatatataaggatgagttagagttgctcatcactgccttgaaatcgtggatgaaagtaagaagatatcttaggtcttttactatagaacacaattagcttatgtacgtattcacttatcaggtaatatttatgattctctatgctcccataaaacctggggatttaacccttatctcactatcatacagaaataaaaagtagcagaattaatctaagtcatccaaaacctgctgtttcagctcccacagtgttacccatttcagttagctgttagttttatatactgctgttttcatgacatttgcgtataaagtttctaccatttcaaagtatgtattgaaactgtagtccttagttggcaagaacaatattcagttcattaagtcagtttcacaaaggaatggaattgaacagtggaaataaccacctgttgtgtattctgagtctgctgtcatgctaagtcttgcagcattttttattaggacattgtatcaaagaggtaaccatggaatacatttgatattattattttgtaatggaacttatttgcttaattttgtgtttgaagacatcaaattaagtccaattcaaatgtaaatactgaactctctaaaaggaaactttttagttggaaacatttcctggaatatataatgatcaattataatccttccaattatgcatatgatataaaacagatagaattaataataaatatagaacattttctaaatttctcaagataagcaacatgaagtggaaattccttctccaactcagaaggaaaaggagaaaaagaaaagaccaatgtctcagatcagtggagtcaagaaattgatgcacagctctagtctgactaattcaagtatcccaaggtttggagttaaaactgaacaagaagatgtccttgccaaggtatgatgatttcaaagatcaggatcataaatattaaatgatgccctttcatgaattttcacttctagtcttttaaatggatagaaaagtttattaattgggtttttttttttctttttttgaagatgggaaggcattttataaagctccttttaaagtgccttagacaggtggtttggtatgttttaggggtttggggggtgattatttgcatcttcatttcattgtttggccttaaagagttagaaatctgtcatgtcttctgggttttaggaaaacagttaaggttttgtgaatagattttatccattaaagaagtgctttgtgattgatacttaaaaagtacataaatgtgttgtaatgtcaaagtcacaaggttaagccatactgttcaattttcagtacatttaagtaaatgtgcctaaagtttgcctatgcttacatggtgtgtctgttaacatttaaaatgaatcattgtttaaaacaatctaacaatctttacactgaagtctgttttgttttgttttgttttgtttgttttgagacatagtctcgccctgtcacccaggttggattgcagaatgcagtggcgcgatcttggctcactacaacctctgcctcctgggttcaagcaattctcctgcctcagcctcccaagtagctgggattacaggcacacaccaccacacctgactaattttttttatttttagtggagatggggtttcaccatgttgggcaggctggtttcaaactcctgacctcaagtgatctgcccgcctcagcctcacaaagttctgggattacaggcttgagcctccatgcccggccacctaaggtctgtaatttttaaatgattgtgttcattgagtcatattttactccactttctaatattttagtatctttttttttttttcactccaggaactagaagatgtgaacaaatggggtcttcatgttttcagaatagcagagttgtctggtaaccggcccttgactgttatcatgcacaccatttttcaggtaagatggttgagttctattacatttattttatttaggaacttaatgtccagtctgtagcttatgcatacattttgtcttttttaatattccccaccttttgcttatttttatacttttatccttatttgctcctttgccaagggacaagtaaagatacagaaaggtggagtgtggataaaccacaaataacatcaattttgttattttttttgcatttaagaaaaagatgtgatatagccaaattgaagcaatttattaaaataataatttagacatcatcttagtcatctgaacctgactgcatagagaatggagtactaacttaaaaaaaatgaataaagcccctgctggctactaaccttagaatatagttttttcagtcattttcttgtgtcctgcttctttcttcatatccatttctctctcttattgaccctttgctccagcttagggtgggatttaaatgagaagttgaggctgctgtagatatctcgggaccgaaatgggaaacttcagccctagagaggacgttgatttttagttggtgtgatgcaggggttgagttaatagtgcttgactggagctgcctccatgataatgggacatagaaacttttagagttggcacctcattcctgacaccatacagctagggcgtagtattcttgggttccagcaggacaacccaactctggttttgtcccagagtccctggatcttctcagaggttcccattttcctcactagacatgtgagagtgcagttgccatttccaggttatccactggcaacactggtgtgtgatttttttttttttaaacatactctatggagaaatttttcacataaagacaaaaatgttaagatgattttttttcctacaggaacgggatttattaaaaacatttaaaattccagtagatactttaattacatatcttatgactctcgaagaccattaccatgctgatgtggcctatcacaacaatatccatgctgcagatgttgtccagtctactcatgtgctattatctacacctgctttggaggtaaatctgtttctgaaatttcaagaacactaacttgccactcataaaggtctattaaacttttatctgaagggttttcaatggagaagataattggattcattggaagtataacttattgacttatgggggaaaatgctatagttaatagacaatcaagtctttgatggattttgcttatgaaagttggtcacagatttagtgattgatctgtttatgatattgcttctttgaaatgatccactgaacatttcataaagcacatctggcttactcactttttgttcatttgttttcttgaaatctagtctgacggcttttatttataggccaaagaacgttttataaaacataagcaatatattgatattttttcatagaatatattagaaggacatactttaatttttctaaatcctaagaagttatttcattagttgtttactaaagcaatttgattttcttaagaaatatattttataattcagtttgttttcattataaaattatgttaatacctcatcatgtgggtgagtgattctcaactggagatggtttctcttcccctttccctcctgccaccaccagggacatttggcaatgtctggaggcatttttggttgtcacaactatcacatttttagttgtacatgatactggcatcttgttggtagaggccaggaattctgctaaaaatcctacaatgcacaggacagcctcccacgcaaagagttattgggcccaaaatgtcaatagtgctgaagttgagaaaccctggtttcgatgaaagaaaataattgctaatgtcttactaattttatgtacattttcagaatattcttagacatcttaaatatttagaaaataaactattattttcttttaaaataatttcagagttttaaaataatattttaaaaaatacagtgaatggaaaacatttgatcatgagatgtaataaaattagataaaatattttcttccaagattatactttaaaagttcacaagtatctaagactctcccttgacacattgtaacacattttgaagcttcattttgttttccatttaaattctagagatttcttatttgtttatacttttaattcatatcattgtagaatagtaatattatctatattgtctgattttccaggctgtgtttacagatttggagattcttgcagcaatttttgccagtgcaatacatgatgtagatcatcctggtgtgtccaatcaatttctgatcaatacaagtaagtaaactttattttttcagaacacatttttcctttgtacattttagaatgactaagggtctttataaactcagagtcttccagagccataatgttcttttgagatgtatatatatgtgttttagtgatagttcatgttaatgtaatttaactgaaaattatcattatatcccttgaggcatgtgatatttgaaaaatgtgttccagttctctttaaaagtaatatattgctgtgttactagacaagggtaattaaaaatgaaagtgtgcagaaagatttagaaagttgtattggccctaaagttttaaattaaaaaaaaagttatgagaattaatggtaagtgttcctcactttatgtaggtcatcatttaatcctcttcagaggccatagcttcccttcctcctccatgcccaacccctgttctttcctttttaaaatcttctaataagggtaacaggaacttcttaatattttttcaaccatttggttttttctcactgttaacatctcaccttataagaagtcatcactgaatttggaaatataaggaatagtagagactgtttaatatggagcatctctgacattgccgcacagaaagcctgtgtagggaatgtttaggtaatgcttgagctatcccttggtaaagagatttaggtttatagaaattctatttggtacttgaagttaattggtaagtgatttaagtgaactatgacttaattccctcccatatggtagattataaattatggtagattataaaatcataaattcacttttatatataaaaaatatgcaaagttgttgaaaatgttgtatgcttaagaatccacctttctttcatttttgcttgaggctatgaataatagtcttctcgtgcctatagcaatctagctatagaattatttatgaattcaccattcatttcctgtactttgctgtagccagatttaaagaaggaatgtagaggtaaccttgctttgagagatttaattcagagctttaggattattcacctatttttatatcttataatggcctctggactatcctatagcaaaatatactctaatgactcatccatgtagaggactggaaaagtcagggatttcctgagatgtgtggttagtcaagtatttttttacaagtttagtttaggaacttatttatccagattagacaggataacatttcatgttctacctacctatgagcacctataatgaggtacttttagaactcatcaaagcatacatacaaatattaatatacattggatgcagctccctgcatttacatggtatcagtggggaggtatcagtggggagggttcattatgtcctttctaagaagagcagggaggtcatgcaatacagtgcatgctggcactttacatgagcctggcctgatttattttgatgcttatgaatgtcttgagatattctgaattttatcaatttttagtaaatacataaaatgtatttttacataaaatttttgtgttaaaggtatatatatatatatctatcttaaacaccaaacattcaaactggtatgttttctttgcattctgttatatagcatattatatgttcccttagaattaagagtagatttagaagacaaattaaaacaactgatagaaaggtcactgtcttccaagtactctgatacattttttaagggtaatgaggacctgctctattcttcattcttttgagcccttaaagcagcagtctccaatgtttttggcaccagggaccaggttttatggaagacaatttttccataaactgggggcgcagggagagaatggttttgggatgaaactgttccatctcagatcatcaggcattagttagattctcataaggaacgcacaacctagatcccttgcatgagcagttcacagtagggttcacgctcctaggagaatctaatgtccctgctgatctgacaggaggcagagctcaggcagtactgatgcgggcttgcctgctgctcacctcctgctgtgcagcccagttcctgacaggccacggaccgatattggtccacagccgatggatggatcagggacccctgctttaaagggcacttgggctttgactggcacctggaggaccctggcatcagggtccctgtgcagtctgccatttaagctaacaaggcctcagtctacagatgaatctgatactctaaagtttgagaaccaatgaaatagtggaggaaactgaagaagataattttatctccttaggatgtctgtttaaagtcattttgctggtgacctgcctgggatggaaggataactaatcctgccgctgcaaattctttctttgttatttagtaatattgcaatgatctcctttctgtgtgaccacagcgacatagggaagttcacagttgccagagtagctttggattgctaaagtttttttgacgatgaggtgtgatgaggctgtgttattcctgagggaatgaatcagcattgtcactttgtacaggaaagtatcccagggttgttccgggccccagggcattatcaaaattacagccttagttagtttggtttggctagggatcatgtaagagaattatcttcccagcatgcagtaaaggaatccttctaataacttgtaaacttgtgatatgtagcttcgtgaaatattttatcaaaatttgtgcttatttttagtttgcagtaaaccttttttaaaatttgactttttatattttatggatggcttgagcatccatgtgtcaagccagcacattctcagctcttgcctcagagctggagctgccatcctgtccaaagcctgcagctgaatccatatttctcataataaagaattctaaagacctctgattatcaaatttataaacccatagttggttacttgtcttactttaaggaagctacggaagcactgagagcttaaggcacatggggggcgctggggattcccttggctggttcccagggcagttaatcctcctgcttcttacatgtgctcttcgtttttcttaattatttcagttgttttagctttaggtgccaaatgattttatactaattgtatttacactcgttgaaagcatgctggaggttctgcaagcagagagaacaattctacctggtagagttggttaagctataataaatgatttgagtgtgggtactgtgaacaggatttagagaaattgaaatttcaggcaggaagctgcgtaaatatttttaaaggatgatgcatataaataaatccataggccaggtgcagtggctcactcctataatcccagcactttgggaggtcaagatgggtgaatcactgacgtcaggagttcggagaccagcctggccaacaaggtgaaaccctgtctttacaaaaaaaaatacaaaaaaattagccaggtgtggtggtgcatgcctgtattcccagccactcaggtggctgaggcaggagaattgcttgaacctgggaggtagaggttgcagtgagccgagatcataccatcacactccagcctggacaagagtgaaactccatctcaaataaataaataaataaataaatccataaaatgtaaatagcagcatgaacttttgaatataaaatgctggagggtatatttaacttagctttattttctgaaaaaaagtatcaaaagtacagaatatagcattaaattttacttggcaaatgaattatttttgttaatagcaaagatgcctaagtttggggcagaaagatttattcacattagtgatgcattcaaagcatgaggtttttggtttccaagagcagaggcatttcattatattaaggttaagatgtatctagctgtcagtatacacttttttatttctctacttttattttgaaattaaaattttcatagctacactagtagattgtatgtagaattttatttttctgtataaacccacaccttcaaaataaggataaattcatgtttatcaaatgtgattatatagatatagctacagagattattttattcaacaacaatgtactgcaagcctactaaatgttataataaatattatttcaggcacttaggacacatgggtggacaagacaagacaaatccctggctcttaagagctggcattctgctagaaaaggtggagcataataagtgaatttatggcatgtgatggtactaagtgctatggaggaaaataatgcagggtgagggcatagagagtggagtgatgaatgaggcagttttcttgacaactgaatattaagttaaaaccaccacttccctctgtcatttcatggagaaatgtttgtttctgaagtccttttgaagatttatgtttatttcagttgtaacttagagacatggtgtagcatgctgtcattttctaactcaaggctaagcctagtaaagctgtaagaacagtgagtgtaagtcttacttacaggatacatatctatagtgtctgccccagtcttaactgtttcagctccaggtcttaatattggctctgatctgccatgtggactccatcataagacacaaaaaggcacaatacctagtggacttagttggatttgggaggcaatgtattccttctttgtgtgtgttactctggcccatttactaagtgatctgaaaagctgctagtttagatggggcacagaacaagagagtgtcacaaaaactgctagttttgagtggggctctacaacaggtccagcctgctgtgcaagctgctctgcacatgggccacatgatccagcagatttaatggtgcttgaaatgtcagtggcagataggaatgttgtttggagcctttgacagagccctctgtgtgaatcacagcacagactctggagcaagaccctgccatcatccaaagaaagataactaactactctccttttgaaagaaagatataggcctgctgctgggccttaggagatactgactgactatgggccaccaagtttccatgtggtttaagctgtctgcccatcattaatagggtattatctaacgcgccaagccatatgttgggcatgtacgacatttcatcatcaaataaaagtagtgtaatacacgatctatcaggtccgagcagacactaaaggcacaaattacataaagaagtggccctaatgccactcctattaattacactgccttctttctcccagcctacacatgtggttgcatggaaagttccctgcaagtagttgacagagggcctggtttacggatggttctgcgtgatacgcaggtaccaccggaagtatacagctgcagcactactgcccctctctgggacatctctgaaggatggtggtgaaggggagtctttccagtgggaagaactttaggcaaggtgactcgttgttcactttgcttggaagagggaatggccatatgtgcaattatataccagttcatgggccgtagccaatgatttgtctggatagtcagggacttagaaggaatatgattggaaaactggtgagaaagaaatttggggaagagatatgtgaatgatctctctgaatggacaaaaaaggaatgctcaccaaagtgtgaccttggcagaggaggattttaataaccaagtgaataggatgacccattctgtagatactagtcaacttcgttccctagccacccctgtcatcacccaacatgctaagaacgaagtggccatggtggcagggatggaggtggcaggatgtgcttagaaacatggacttccactcaccaaggctgacctggctatgactattgctaagtgcgcaatccaccagcagcataaaccaacactgaacccccatataacaccattttggggggatcagccagctacctgatggctggttgattacattggaccacttccatggtggaaagggtagcattttgtccttagtggaaaaggcactttctctggaaacagatgtgccttccctgcagtttttctgccaaaactatggtattccatacagcattgcctctaaccaggaactcaccttactggcaaagaagagctgcactgggcttatgcccatggaagtccctagtcttaccatattccctaacatcctgaatcagctggcttgataaattggtagaatggccttttgaagactcagttactcagctaggaggcaagaccttgcagggctggggcaaggttctccagaaggccataaaggccatatatgctctgaatcagcatccaatatgtggtgctatttctcccataaccagaattcatgggtccaagaatcattggatagaaatgggactgttaccactcataattacccccagtgacccactagcaaagtttgcttcctgttcctgcaaatttatgtgctgctagctagaggtcttagtttcagaaggaggaatgcttctatcaggagacacaacagtgattccgttgaactggaagttaagacctagccactttgagctccttatgcatctgattcaatcatccaagaagggcattacagtgttgactggggtgactgatcctgactaccaaggggaaattgggttactactccacaatgaaggtaaggaagagtatgtgtggaataaggagatcccttagggcatcccttagtattaaccatgccctgtaattaaggtcagcacaaaataacccaatccaggcaggaccactaataacccatacccttcacgaatgaaggtttcggtcaccccaccaggtaaagaatcatgaccagctgaggtgcttgctgagggaaaagggaatacagaatgagtagtaaaagaaggtaattacaaataccagctatgaccatatgaccagttatagaaataaggactataattgtcatgagtattttcttatgaatgcatttatatgtatatatacatatattaagcatatatcttcattttctttttcttattcccttatataacataagaggtattaactttatattagtatttaagtatttattttatatcatagtatttaagttataggctatcaggataagagtaaacattactcaaaaactttactttcacttctggggaatgtgttagtgtgcttttagttgtatgcaggatagttgtagcctgtttggtagaattatggccttatggagattaaatatggttaaaggagatgcttatgggtaccagggtgacaaggggcagaatttgtaatggttaattttatgtgtcagcttgactaggctaagggatgcccagatagctggtaaaacactattttggggtgcgtctgtgagagtgttcctggaagagattagattagcatttgaattggtagactgattaaagaagattgcccttaccattgttggcagggatcagtcaatccattgaggacctcaaagagaagaacaaaacattgggggaagggcaatttgctttctcggagcctggacatacatattctcctgcctctaacatcagggttcctggttgattctctggcctttggacttgctttcctggttcacctttgcagacatgggacttcttggactccataattgcctgagccaattcctataataaataaatgtgtctttttctcacatacacacacacactcatacatatgtctattctatttctctggagaaccatgattaatacagagagagaaaagattagcacagatgaagtacatgttctcagttatgtggtagtacctgcccacccttccccccatttcattagcactcagaagagagggacacaaaagtggtcttcctgccttcagtagtagcatatgttgggcataatttaatttattcttgatgatccagggtagttgtaacaaatgagcacaattgatctatatataataaaatgatggctttgagtttgtaaaggtatgcatggcctctcaataaaaaataaatacttacaaagttgtctttataaatgtgtgccaggcactgagtggactgtgttgatttcctggttcatgtttagtgttcactgctcaggttttcacctctataaggtacttgtaatcatagtcagtataaggtgagggctctagaaactgcctggttttaagtgctggccccagcacttactggctaggtgatgttggcaaagttacctaccttctctgaggtacattttcttcatttgtacaggattatatgagtatgtctatgtaaatatttatgtgtataaaagatgtccccaagggacattttctatcccccagcctatcccaaggacacaaagacttacttcccacctatatggctccatgccatccatgaatggaacatagccttaaaatgtcgataacaacagtatcttcctaaaagagttatgaggattaaatgagatgattcacataaaccatttaacacaatggcacctaaatcctctaaatgttgtgccttgctgtattcctgtttgtactttgtaagtttgaaataattgaagtgcctaggggaagccagataaccaaacatattaaattaataacctttaatattttgtaggggcttaagtctctaagtaggttgggagggtttggggaggaacgattaaaagatttgtagagataaagacaaaaaaggtagaatgcgatacatgctaaatgggtggtacaaagtcgtatagaagtttacaggagaaagtgggcagtttcatctggtaattaagaaagacttgatggaagaggtaacttatattgggcttgaagatgaaagggtttcaacaaaaatgttatataagctaacctctttgcccctctgtgctgtgcactgtaccatcctgacagcaactttctgatcattcctgaaccttcaaggactctacttacaagtaatggattagtgtctttgatgaaaatctgctgaggagctgcagactcctacctcccaatttaaatgtgaccatatgccttcagtcctaaagaagagtagcaagttaaataacttccttgagattcagtttcttaaatgctaacatttgttcatttaaaaatcaacagtcaccaccactttcctgtaacagcatctgagatggaagaggctatggaggcctgccagtccactaaggcatcctttcctggcttttctagccaatctggactctttaagtgtcaggagataaccactctccaagacaggccttgccagtattcttggacatctgccctacatgaaaggccctacttatatccagtagaactcagactctttgttgcaccttccatacaacagatcacccttttccttgaaggaagagctcatcatcttattcttttgcagggtcaacagccttaatttccttcaccttcagcttcatataagccaattagggtttttgtaaggctaagtcaattctgttaacactgcttgtctacatgcatatttccttccttaaacgaactctaataattatccagtatctaataattatgccttcctttcaatatatgtttgtttatttgattccactgtagaaatacaataatatgtgctaagaacctatatagttttaaatttttcatttctatatgcttacctatctgtagataaaggttcataaaggcatttatagacactataaaagttcaccagaaactgccttttaaaagataaacactattgttttatctaaagaaaacaaaaaataacaaaaaaatactgtacaaacctactccctactagtctaaacagctctgctcctgtagtttgggagcagaaatttaagtgtgcaaatttgtatttctatagttccgataaaataatagaatttctcagttgaaaatgtcttaagcctctcctctccttcctagctccattaaaatagccattgaatagtattgggtatttctttcttaaaaaaagatatatatttccaaatatattttctatgcattcgttatatattttctatgcattcgttagaaaaaagatcaaatacctgtgcttttaacctttttcttttcttttcttttctttttgaaacagagtcttgctctgttgcctagtttggagtgcagtggcacgatataatggctcactgcagccttgaactcctgggctcaagcaatcctcctacctcagcatcccaagtagctgggactacaggcacgccctaccatccccagataattttttattatttgtcgagatgaggtctccctatgttgaccaggctggtcttgaactcctgggcttaagcaatcctcctgcctcggatttgcttttagtctttacagtgattaagtggaaagagaataaagcatcaaaagttttttaatgattatcttgtagctctgggtctgctatttacaagaagtaggagagaggcagaatctctccctgcctaaaattcacaggtctagggcagtagggagagagtggcagaatcttcaccagagggtatacagacagccaaacacaacatcactgtgaagctgtgagcaagcaggcaggaagagcaatatccctgtacagtatacaatgactgccacgatacttggaaaagaaaatggaaaacaatgaataaagcttggactttcagagctatacatgagcaaatgagcaaatctaaacttgttcatatgattccttattgttcttgtaccctctttgagtacaaacaatcctgtaacacacgatcctcactttatatagtgcagggtaggtaattcacagttatcaggaatacaaaaccttatgctctggatgtgttatagatactaagaataatgtcatattctgctgagctcatggcaactctagaggagaggttaaagatccaattctttcactttagagaaagctgagacctacagagtgaaatgacctgccacatgttagtagcattagaattcactccccaagattcattccagtgttgttcctgctcttatgttatctgatttattctctcctggatattgtcaggtaatgataagggcagcagagaagtttaggggaaattacatcctaaatccagaattttaagaatcagataaacttctcacaaacagttttgctgatctttggccttttgtcttttttacagactctgaacttgccttgatgtacaatgattcctcagtcttagagaaccatcatttggctgtgggctttaaattgcttcaggaagaaaactgtgacattttccagaatttgaccaaaaaacaaagacaatctttaaggaaaatggtcattgacatcgtaagtagctgataaaagccaaagaagagaactgtgatgcaagttgtttataatttagacataagaacaagatgagtattaggtaaaaggaactgcatttcaaaacatattatggccctttatgttatagaagctgcccgtgatgctggctgtgatgttctgtaataggtttttcacttctagcagtttggacttgagaataatgtcagctcaccctcatcatttattttctgggcccctccagtctggtggcgggcagagaaaaatgactaacaaaagcagattgtgtgggccacagctcaaatggatttttcccccaccttttctcatcagtagacagtgccatttagacatccatgactttactcttttttctatgcatcttattcagtgattatgagacacaggaaaatctctagctttcaaaaacttacaaacttgtgatgatgtcttatccatggagatgtcacccatttttcaccatgaaagtggttgtcagtgcctagcatttctgtatattacacacatttatctgggctttgggaaaacttgatagcaaaggggaaaagactctgcccccaaggagtagtaaggattttccactgtcattaaaaggcatagtgttgttttattcctttttcattcttatattctgcgtaatattttcatgtgtaaattctgttttctctgaacttaataatatactctatattttaaggtacttgcaacagatatgtcaaaacacatgaatctactggctgatttgaagactatggttgaaactaagaaagtgacaagctctggagttcttcttcttgataattattccgataggattcaggtaaagccttgtttgagtttgctctgtgtgtgtgtgtctgtgcacatgtgcacatgtctgcgtgttcagctttgataagatgtatttcttccttctcccaccttatactttcagcaattgtaggcaggatttttatccaaatttttattcctgagaattaaccaggtaaaattctactggtctttctgtttgcatctacattaattaaaaaaactaacaaacaaacaccccacagaaccagccacttaagcagctctgaatctagtcagccatgcacataaacagtttctcttaagctatttagatgcagtagaagtggcataatttggaactattaatacaagtgtgaactatacacagacacatcatggttgagctgtttggaataaatcttacactacgtgtatttttaagtgttgcagtcatccaatgtgaatttctagttttttttttgttttttttttttaaaaaaaggaacaggaatgaatagagaatgcatccatctattttaggttcttcagaatatggtgcactgtgcagatctgagcaacccaacaaagcctctccagctgtaccgccagtggacggaccggataatggaggagttcttccgccaaggagaccgagagagggaacgtggcatggagataagccccatgtgtgacaagcacaatgcttccgtggaaaaatcacaggtaatgcatgaagtgtatagctttcagagagaacagagctaccgctttagcatttggttactttgtattacatatgatagtattttactggatttttaaaattactttgtttttgacaagctcaatttcaccttagtatttatgatccaaagaactttcattcttatgacttacattcatatagtcatatatatattctaaagacatattcatttattatgactatattcatttaatatattcatatacatagagcacatggcattatttcagttatctggattcacctacaaattggtgattgtaaaataagccctaccatgtcaacaactggaaaattttttatgctatgaacatgctctttaaccaaaggttctagaagctaattttgaccagctagtagcaatactttactttaaatggtctgttgttgttgaaaatagtgacaattttaccaaactaagtttagtagtcttctgttcagtgttttatttgtgggccatgatctaattaagcttttccattgtttcttagtcccaagtcctctactcatactggatttttttcttaactaggtgggcttcatagactatattgttcatcccctctgggagacatgggcagacctcgtccaccctgacgcccaggatattttggacactttggaggacaatcgtgaatggtaccagagcacaatccctcagagcccctctcctgcacctgatgacccagaggagggccggcagggtcaaactgagaaattccagtttgaactaactttagaggaagatggtgagtcagacacggaaaaggacagtggcagtcaagtggaagaagacactagctgcagtgactccaagactctttgtactcaagactcagagtctactgaaattccccttgatgaacaggttgaagaggaggcagtaggggaagaagaggaaagccagcctgaagcctgtgtcatagatgatcgttctcctgacacgtaacagtgcaaaaactttcatgcctttttttttttaagtagaaaaattgtttccaaagtgcatgtcacatgccacaaccacggtcacacctcactgtcatctgccaggacgtttgttgaacaaaactgaccttgactactcagtccagcgctcaggaatatcgtaaccagttttttcacctccatgtcatccgagcaaggtggacatcttcacgaacagcgtttttaacaagatttcagcttggtagagctgacaaagcagataaaatctactccaaattattttcaagagagtgtgactcatcaggcagcccaaaagtttattggacttggggtttctattcctttttatttgtttgcaatattttcagaagaaaggcattgcacagagtgaacttaatggacgaagcaacaaatatgtcaagaacaggacatagcacgaatctgttaccagtaggaggaggatgagccacagaaattgcataattttctaatttcaagtcttcctgatacatgactgaatagtgtggttcagtgagctgcactgacctctacattttgtatgatatgtaaaacagattttttgtagagcttacttttattattaaatgtattgaggtattatatttaaaaaaaactatgttcagaacttcatctgccactggttatttttttctaaggagtaacttgcaagttttcagtacaaatctgtgctacactggataaaaatctaatttatgaattttacttgcaccttatagttcatagcaattaactgatttgtagtgattcattgtttgttttatataccaatgacttcttccatattttaaaagagaaaaacaactttatgttgcaggaaaccctttttgtaagtctttctttattatttactttgcattttgtttcactctttccagataagcagagttgctcttcaccagtgtttttcttcatgtgcaaagtgactatttgttctataatacttttatgtgtgttatatcaaatgtgtcttaagcttcatgcaaactcagtcatcagttcgtgttgtctgaagcaagtgggagatatataaatacccagtagctaaaatggtcagtcttttttagatgttttcctacttagtatctcctaataacgttttgctgtgtcactagatgttcatttcacaagtgcatgtctttctaataatccacacatttcatgctctaataatccacacatttcatgctcatttttattgtttttacagccagttatagtaagaaaaaggtttttccccttgtgctgctttataatttagcgtgtgtctgaaccttatccatgtttgctagatgaggtcttgtcaaatatatcactaccattgtcaccggtgaaaagaaacaggtagttaagttagggttaacattcatttcaaccacgaggttgtatatcatgactagcttttactcttggtttacagagaaaagttaaacagccaactaggcagtttttaagaatattaacaatatattaacaaacaccaatacaactaatcctatttggttttaatgatttcaccatgggattaagaactatatcaggaacatccctgagaaacggttttaagtgtagcaactactcttccttaatggacagccacataacgtgtaggaagtcctttatcacttatcctcgatccataagcatatcttgcagaggggaactacttctttaaacacatggagggaaagaagatgatgccactggcaccagagggttagtactgtgatgcatcctaaaatatttattatattggtaaaaattctggttaaataaaaaattagagatcactcttggctgatttcagcaccaggaactgtattacagttttagagattaattcctagtgtttacctgattatagcagttggcatcatggggcatttaattctgactttatccccacgtcagccttaataaagtcttctttaccttctctatgaagactttaaagcccaaataatcatttttcacattgatattcaagaattgagatagatagaagccaaagtgggtatctgacaagtggaaaatcaaacgtttaagaagaattacaactctgaaaagcatttatatgtggaacttctcaaggagcctcctggggactggaaagtaagtcatcagccaggcaaatgactcatgctgaagagagtccccatttcagtcccctgagatctagctgatgcttagatcctttgaaataaaaattatgtctttataactctgatcttttacataaagcagaagaggaatcaactagttaattgcaaggtttctactctgtttcctctgtaaagatcagatggtaatctttcaaataagaaaaaaataaagacgtatgtttgaccaagtagtttcacaagaatatttgggaacttgtttcttttaattttatttgtccctgagtgaagtctagaaagaaaggtaaagagtctagagtttattcctctttccaaaacattctcattcctctcctccctacacttagtatttcccccacagagtgcctagaatcttaataatgaataaaataaaaagcagcaatatgtcattaacaaatccagacctgaaagggtaaagggtttataactgcactaataaagagaggctctttttttttttccagtttgttggtttttaatggtaccgtgttgtaaagatacccactaatggacaatcaaattgcagaaaaggctcaatatccaagagacagggactaatgcactgtacaatctgcttatccttgcccttctctcttgccaaagtgtgcttcagaaatatatactgctttaaaaaagaataaaagaatatccttttacaagtggctttacatttcctaaaatgccataagaaaatgcaatatctgggtactgtatggggaaaaaaatgtccaagtttgtgtaaaaccagtgcatttcagcttgcaagttactgaacacaataatgctgttttaattttgttttatatcagttaaaattcacaataatgtagatagaacaaattacagacaaggaaagaaaaaacttgaatgaaatggattttacagaaagctttatgataatttttgaatgcattatttattttttgtgccatgcattttttttctcaccaaatgaccttacctgtaatacagtcttgtttgtctgtttacaaccatgtatttattgcaatgtacatactgtaatgttaattgtaaattatctgttcttattaaaacatcatcccatgatgggatggtgttgatatatttggaaactcttggtgagagaatgaatggtgtgtatacatactctgtacatttttcttttctcctgtaatatagtcttgtcaccttagagcttgtttatggaagattcaagaaaactataaaatacttaaagatatataaatttaaaaaaacatagctgcaggtctttggtcccagggctgtgccttaactttaaccaatattttcttctgttttgctgcatttgaaaggtaacagtggagctagggctgggcattttacatccaggcttttaattgattagaattctgccaataggtggattttacaaaaccacagacaacctctgaaagattctgagacccttttgagacagaagctcttaagtacttcttgccagggagcagcactgcatgtgtgatggttgtttgccatctgttgatcaggaactacttcagctacttgcatttgattatttcctttttttttttttttttaactcggaaacacaactggggaaatatattctttcccagtgattataaacaatctttttcttttttttaagtccttttggcttctagagctcataggaaaatggacttgatttgaaattggagccagagtttactcgtgttggttatctattcatcagcttcctgacatgttaagagaatacattaaagagaaaatactgttttttaatcctaaaatttttcttccactaagataaaccaaatgtccttacatatatgtaaacccatctatttaaacgcaaaggtgggttgatgtcagtttacatagcagaaagcattcactatcctctaagatttgtttctgcaaaactttcattgctttagaattttaaaatttcaccttgtacaatggccagcccctaaagcaggaaacatttataatggattatatggaaacatcctcccagtacttgcccagcccttgaatcatgtggcttttcagtgaaaggaaagattctttttctaggaaaaatgagcctattttattttattttattttattttttgacacaaactgtagattttagcagccctggcccaaaggaatttgattacttttgttttaaacagtacaaaggggacactataattacaaaaacatccttaactgatttgagttgtttttatttctttggatatattttcagagtggtaaattgtgtgtgagaattacaaatgattattcttttagtggtttcttagcctctcttacagcccacggggatagtactgtacatcaataccttcatatgaaatttttatatgcaatgaaaataaaagcatgggttgattctgcctatttatgactcaatcttttacaaataaaagattattcattttaaattatagttcaatcagcatgtctcttaggatactgaacgtggttgaaatgaaaggatagtgacatcataagttagtactgatattcataaccaaataaagccaacttgagtaattttgctacattaaaaattaccaaaattacttagatggcctataagattaagcatggtgttttctaagcaagctttgaaaggggccttccatacttacttaattgaatattctgggatattgaaaattattcagatacttgacaattatttttggttacctactccgcaaactacaaagttttaaggactcaacaataagttaatgagacacagtgtttgctttcatggagcttacagtctggaggggacaaaggcttaaacaatactcatataattatatatgtgatcagtacaatgaaggagctcagtggggtaaataagcaggaacctgaacttgatctgttccggagggccacagaaggcttccttgaggccttgagaaagtgatttgcatctgagttctgaaggattgtaagaggtaactagggaaaaagttgacaggaagaggaaggggatccagacaagaaacatttgcaaagatcttgaggcataaatgagcttgagacatctggagaaactgaggaaaagtgagagagtaggcagggcctggagccgcagagccattgctaaccatcctgtgtgagatatcccccattctgtagctttattctcataaccctgctcaattttctttataacacttctcacagatttatatacgtgtttgtttttgttatctgtctctcccaccagaccacagctccatgagagcaaggtctttgcttaccaatatatcactagcacttaaaactatgcctggtacacagtaggttcttaatatgtgttgaatatagccatcaaattgatattggatataattcaatctgataagatattttgagatattaaagagtttttaacttgataccataaaaactttgtttgttttttgtttttgagcttactaagatcctggataaagagtttagagtttcctatctctttgctaactaaaaactctgtttgcttattcctcacaaattctacttttttctaaatgacaatccatttgtcatgataatgagagtaaagaaatcagcacaaatttaatccccagatcatccccagaccatgccagcagaataagggtaattaaacagagcatctatgcttagcctctccaccatttctcctgccacaacagtcctgacagccaacaggtgccaaatttgtgccttcctgggaataactgttttaaactcaagctcccttccccaaagccatgaccccaaagtgacactatggaactaaggaagcaactcccttcttttcctgacttgccacgcttgctgatttaggctaatttgggtggtggtgggcctgaactcacattaaaatctctgacctggaaacctttcctcaggcacacggctttggacccacaacagcaacattccaccaaaaaacaaaccaaaaccaaaaacattccctgttgctagagagtaccacctgtctaccaaggggaaaacaaccttgtgtcaggggaatcataccagggctttcccatccttctgatttgggtcctgcatcccacccagctactccgagagctccaaatactctaggtcaaactcagtgctatgggtataaatcttgaatttgtacacataggaaatactactttatttcctttaaatcaattaatctggactcggggctccagccaatcacactattggaaattcccatctctcattactgccacagctcctctctctcccaacataaaatttatcttatctccaatataatctgagtatcaggcctctgtgttgttccagcagaggttccttacagtccctcagctattagcttcctggtcacatgtggtgtaccaggaatatatgctggtttggggccctgcttccacacagtgtgtgcatcaaaagagcctatccttctggtgttttattacaccttgctgtggtctgaatgtctgtgttgaaatgctaacccctaggtgatgctattaggagatgggggccctttgggagataattaggttatgaaggcagagtcctcatgaatgggatcagcgcccttataaaagaggcccaagggaccttgttcaacctggccaccatgtgaggactcagctagaaggtgccatctgtgaaaatgaaagcaggtcctcaccaggcaccaaatctgccagaaccttgatgttggacttcccagcctctagactgtgagaagtaagtgtgttgtttataagccacccactttatggtattttcttatagaagtctaaggagactaagacatacctactgaaattactacaaaaaaaagcagttctttcttttcctaattctcaacatattctccttcttctctctccttccttcttttgctctccaatgagatcaggcttaaaaacaaaaacgaaacagactagaggtagttgtgacttccatttgcttctgctctccactctgcaaaaaccctggctattatttgaaatatggagacgaaaaaagatattggaagagcatacattaaataatagtccattaaccttccacacatggttggcaacatctagatccaacaatgttcactgaacattttgagatgtgggaagttgaggaagttgtctccaagaggaagtcatcaggaactcccatacttcctatgtgggaacacagggaaagaggcattttttcctgaagtctctgtgttccagtgctatccctgaatgtctattcccagctctcgcttagctgtttcaatgacaagatatagcacttgaaaattttataaagtgagagtcatatttgctccctgctgcaagcccccaccctgccattccaggaccctgctatggtccacaattggcattatgattccctctattttgcagctatgaaaagtgaggcccaagaaggttaattgacttggctaagattattcacaggctaaatactgagattaatgatttgcaaactacagatttgacagaagtcctaatgctatctctacatcctatttctgttgaggaccaaaattgactgttgcattgcctttgatttcctttgaccatccttcattacagatttcagtaatttttatggtccaaagctaggtgacagatattacatcatatgcatttgttaactcaccctatgtctgcatagccttgctatatggtcagaattctccagattgagtggggaacttggagttaaagagcccctgaccccctaaaaaattatagaaaatgaaagaagctgtcaagaaagtaaggagcagagataagagcagagatgggagcgtgcctctgcccggcagagactcacaacatgaggcaagacagatcttagctgaacttcttgcaggatgtatgcctcaatgaaaggaatggagcacgggcagcatccagcttaggctggagccccttcaaccatcatggctgttttagcagggtgtttgccagctgcttacaaatcccaagccaacagacatggtttcaggacctgaatcatgcaaacatattttctgaaaggttctatcacctgagaattgcttttccttcgctccttgtttttgaaccaaaaagccgaccaaatgtatagtggcaaacacttgctcagcacccatccatgcaaggcactgttttaccaccaggctgcatcagttagagaaccaagccgtctctcaccttgcagcttcttcacactttgctcattttctctctaacactgatggtttctgtttcctgctattcagttacagcatctgggaagagagtggcagagaacgccaggcaactgcaccctgccacagtgggtcaagcggaggctgggtggtgacacccgtctctacccagcagaagtcagtggttcatgggtggagaacaaagctcaggacagctgctgcagtccagggaactgtccaccatagaagactcttgggaagcagcccctgaccccaaccccctgtgctttttgaagccgtgtctggtatcacatggaattatgcagtagtcatagaatatctttgaaaacttatattctaaaaataattgctgagatcagcgattaaaatatctaataaatggactggaaaagttgaaaacaagcaaaggtgagagaaaacaattgaggaaaactgggagaaagtgaaggaagttggaccctttgtactacagcatccaaggacagtgatgatatcttctgttccccacaggaccaggttcctggtgcttaacgtaacacataaggcccttaaggatctaatcaaactaaatcatccccaactcctcccatcaaccccacatagatatccctgtgcctcagctaaatgctgcctttacaccttgcctttacatctctctgcctggaaaacagctcatccctcttgatccagtttaaatacacctttgtctggaaagcctttcccattagtattttatacacaaccctataataaatatttcccctaatatgttgtattttttaaaaaaattctttctctcactagattgtgagatttttaatttttatttttttagacagtctcactctgtcacctaggctgaaatacagtggcgcaatgttggctcactgcaatctctgcctcctgagttcaagtgattctcctgcctcagcctcctgagtagctgggattacaggcatgcatcaccacgtccagctaatttttgtaattttttagtagagatggggtttcgctatgttggccaggctggtctcgaatcctgacctcaggtgatccgcccaccttggcctaccaaagtgctaggattacaggcgtgagccaccacgcctggcctagatagtgcaatttttaaacatcaatgtattcctttttgcctgctagtaaggaattaagtccggatattaacatttgactattctttcccctctaacaccaactcttctcaaaatgtggtccttgagctgacattaacgtcaactaggatcttgttagattataatctagccccagaccaaggctccaggaaaagactctctaggggtggaccctagaacctgtgttttaacaaggactccaggtgataagtatgctccataaagtttgagaaacactgttcaagacatcatggaggtgtttttctatttctgttttttttaagaagcaagttaataatctcaaccacctttctaatgtatttcatttaatcaaagggatacttgttgctacaggagttacaacagatgacctagtgagggccacaggcagtctgaggaacagtaggatcccatgtttggccaatgtctatcaagcaagaaaggaatagtgaagccagctattagctcccttcagcagaggaaacctgggattaggagtcgccatcaggcatcatggcatcacaagcaggcatgggttaaagatttaaatgttgcaaaaagagagaagaaccagaaggaaattacgtccacattatccctgcaagaccattaatgtaatgaacagaaatcaaacaccttttcagtcttcaagtgccgcattcaggttcactctgctaatcacacagctgagtggccctctgctttcataactgggtgaaaccacacatcccaccccaagatggcttgggatctaccatcacaaggggccaccaaagggccaaataacacaaccccgaaattcagtggtggtaactctccatggggttaactttgattactgggaaactagaaatgggaaggagccagtaaattaatttcttctctcccaagactattctgaggcatagcctcccccttgaagcccatcaggatgatcctgcagttccatgtcagcaagagcgccctaccaagtgacctgcagtgtctcttggctgctccttgtgagtcagtagccagcagagaaatgttttccctactttcctttatttctttgttcttacttgcttcattttgccttgacctttttttcctcacccctactacccaaaggcatgtacttcccaaataaagtctgtcactctgatccctccctcagactgtttccagggatgctgagcaccctgtacattcagaaaagcagatgtcaaatttctgtatatatattggagtgcactaagtatttaaaatcaacctttggctattagaggtagggactgtgccttatgcatcattgtttttccagggcttagttcagtgtctgccatatagcaagtattcatttaacaggaaaagagaaagacaagtgggtaagtaattgcctgaatgaatgaggttgatggtgaagaatgggtgggaagggcatgaattggcctagaatagattagacattaagtaagcaggagtcgagacagttaaggggccaaaggcagctgaaaagaatatggaacaggaatacaagttgaaggaatcaggcattctccctagaaacaaagggtacgggaagggtaagagacagacacttcactgtctgggaatttttatccatactcgttattaaagacacacttggttgcctacttaattattaccaaccctccacccccactttattcctggcatacataagtgggattttgttcaggtcgtgtgaagtcaagtcttccagggagatccagcctctcctcagttctgtaggctaattctgagccttttatggtaattcctctacccttgccagtgattaggttaggacaggcttgccgtgctgcaatagtagacagtgagacacaggttgacttctgggaaaatatccccaactcttacaaagaaaagagagaacagaacattttttcttcggggctttggaaattattttcaaagatgtcatggttaggctattatcttgaggccacgaaaggaactatctgaatacacagacaacatactgaaaatggcaaagcagaagttagatagcacatgagtctttgaagatgtgtttgagctgctgaactaatcagccctactttgaaacttattaagataataactagttattatttaagccattttagttgaacctgctattatttgcccctgaaacaatcctaactaatatactgttagtccatttgtatcgttataaaggaatacctgatgctgggtaatttataaagaaaggaggtttatttggctcagagttcttcaggctgtacaggaagcatgcacggctctacagctgcctggcttctggtgaggcctcaggaagctttaactcatggcagaaacaaggggagctggcgtatcacatagtgggaggaggtggcaagtaggcagggaggaggtgccatgctgttaaacaaccagctccttcatgaatagagtgaaaacttatacattactgcaaggacagcaccaagtggatcatgaaggatcgtgacccaaacacttcccaataggccccaccttgaatattgggggatcaatttcaacatgagacttggagaatacaaatatccaaactatatcatacacccactctttgttccaacaatgtgctggtgagtctgggctgggagtgggggagaaaggtacctggcacagtggaaatgttggaaatttgaccccaaattagctgggtgaccttaggcatgttaattcatctctactttctttcattttaaataggggaattataatattggaatcttctctacattcttcacagtattagagcaaatgaatttataaatgtaaactcagtgtaaactttagataaaatttttcaaacactaagcttgtgacccagagtagataataaagtcaaaagatggttgccatgagcactaaccgtgaattaaaatagaatagagaatatcactgtgtgctgcacataagtttcattttctgaaattgcttcatttacatgcatgcatgggtgcacttgtgtgcttgcacacacatgcaaatgttgccaagtaaactatttttaaaagcatacgaagcatggatttagaacaaagtcaacaccagagacaactagaggaacctaagtctctcaccaacccccacccctgccaatttacctgtcatccatgattcaaaaatggtttctaaagggaaataaaaattgattcaaaagggagacctaatgagtaacataatagggagccattgattgttttagagtggtatgacggagcagtgggtaagtagatcactcaacactggtatttcagactgccaagagaggagaaaacagacacaaagtgatttctgggcttttgacaactttttttttctcaaagtagattgacaatattatgtgtcatcttatatatattaatagacaaaggcaatatctacacttgggaatacttcatggaaggcttggctggaaactaaaaactggactataaacttcttgggggttagatacgtatcttaagacttccttgtgtcttgaattgtgcctagcctagtgctgcatagatatgtaagccactcattcttgtgcaattacctattgtagaattttcagactaatatatttccttttccttgttttgatcctctgctgaatcatgagaatagttctcaggtgaacagcagtgatgtacagtgtctcactggaaaagcaggaaaataatcagatgtaccccagaaccttaggatatgggaggctcttctactggccactccatgggaaactcgcttgctttgggggacagtttgctttgctctattttgtgggcacagggttttgccttatttttctactcccttattcccagcaaacatcctaaaaagatgtgggtaaaagaaaaagagaataaattttgcaattctactcactggctagaaacagacagagacacatgagtagaggcggagtttaccatcacccttaatcatcctggggcccatgtgtgtataaaaggcaagaaaagagccattaccaggaggcactcaccttcacagtttccaccgcataattccacccctctgtatcaaactacccaaattgctacaccaatcacaactgccctcttgttcaaagaaaataatatcatggatttctttcctggcagttctgctattgattgtttttgttcttttaataagcaaggtgagaaggttagaaaaaaattattcagataattcacctgggagtagggtaggaacttgaggcatgcagagagaatggcaaattcaaaatcaactaagccataactgcctatcctactgaccactgtgccaggtacctcaaaagagtaggacttgattcttccttttgaggaggtttcagtttggttggaaaggaatgggggaggggccaagtacagtggctcacacctgtaatagcagcactttgggaggccgaggtgggtgaattgcttgagcccaggcatttgaaaccagcctgggcaacatggcaagaccccacatctacaaaaaatacaaaaattagctaagcatgatggtgtgcacctgtagtcccagctactcgggaggatgaggtgggagaatcacttgagcccaggaggttgaggctacagtgagctgtgaacatgcttctgtgctccagtctggactacagagcaagactctgcctcagataataaaaaaataaaaaaggaaaaaaaaaaaagaaatggggaatggaagaggaaggaatccaggggaagaatgatcactaagactgcatcacaccttttgctatctcatttcaactctacatcaacccaatattcccttcatttaacagagaggtcaaaagaggctggaaggataaggttgtccagtaaaaatgtcaaggctgatatgggaacatagccagtttgtctctaaagtgccctgtgtcccttggggaagagaatatttaacttgattgttgcttcagttttttattctatgtcagctatcagtttgcaaggcattatttaggggatttcctttactttctttttttttaaatctcaaatttccctctcatttagtaactgtaatttcagtgcctaacatgtaggacaaaatactttccatatttttttttcaaaatttttgcactgactgtagtcccctcactggaacagctttatttccctaaataatatacaatgaacttgttcatatcgaagacgtatgccaatattaaatacaaacagctcagctgggcgtggtggctcatgcctgtaatcccagcactttgggagactgaggcaggtggatcacctgaggtcaggagttcaagaccagcctggctaacatggagaaaccctgtctctaataaaaatacaaaaattacccaggtgtggtggcacatgcctgtaatcccagctactcaggaggctgaggcaggagaatcacttgaacccaggaggtggaggctgcagtgatccaagattgtgccactgcactccagcctgggtgacagagcaagactctatctcaaaaaaaaaaaaaaaaaaaaaaggtggctgaccagatggccaaaaggaacagctccagtctgcagctcccagcaagatcaatgcaaaaggtgggtgatttttgcatttccaactgaggtacccagcttatctcattgggactggttagacagtgggtgcagcgcatggagggcgagccgaaggagggtgggccattgcctcacccaggaagtgcaaggggtcaaggaattccctcccctagccaagggaagccatgtgggactgtgccttgaagaacagtgcacttcggcccagactacacttttcccacagtcttcgcaacccacagaccaggaagttcccttgggtgactatgccaccagggccctgggtatcaagcacaaaactgggcagctgtttgggcagacaccaagctagctgcaagagtatttttcataccccagtggcacctggaatgccagcgagacagaacagttcattcccctggaaagggggctgaagccagggatccaagtggtctagctcagcggacc

SEQ ID NO: 1702 - DNA, 637 bp, Homo sapiens
ttctccttcctttacagttttgatgtggacaatggcacatctgcgggacggagtcccttggatcccatgaccagcccaggatccgggctaattctccaagcaaattttgtccacagtcaacgacgggagtccttcctgtatcgatccgacagcgattatgacctctctccaaagtctatgtcccggaactcctccattgccagtgatatacacggagatgacttgattgtgactccatttgctcaggtcttggccagtctgcgaactgtacgaaacaactttgctgcattaactaatttgcaagatcgagcacctagcaaaagatcacccatgtgcaaccaaccatccatcaacaaagccaccataacaggatcctggatggaattgaacccatatacgttacttgacatgtgaaacacgtgtgaccctggcagatgatttggctgaccttgaaaactacagctgtttagtcactttgaaaacaatgcaatacaagtgatttactaggcttcagttttaaccattttatgctgactggtggaaattctaacccttcagaaagaaaaaaaaattgtgaagcaatggaaatgtaccatcctgggtattaatgtcattaattttcaatacattttctcac

SEQ ID NO: 1703 - protein, 115 aa, Homo sapiens
MTSPGSGLILQANFVHSQRRESFLYRSDSDYDLSPKSMSRNSSIASDIHGDDLIVTPFAQVLASLRTVRNNFAALTNLQDRAPSKRSPMCNQPSINKATITGSWMELNPYTLLDM

SEQ ID NO: 1704 - DNA, 6803 bp, Homo sapiens
atgaaggagcagccctcatgtgccggcaccgggcatccgagcatggcggggtatggcaggatggccccctttgaactcgctagcggacccgtgaagcgcttgagaactgagtccccctttccctgtctcttcgcagaggaggcctaccagaaactggccagcgagaccctggaggagctggactggtgtctggaccagctagagaccctacagaccaggcactccgtcagtgagatggcctccaacaagtttaaaaggatgcttaatcgggagctcacccatctctctgaaatgagtcggtctggaaatcaagtgtcagagtttatatcaaacacattcttagataagcaacatgaagtggaaattccttctccaactcagaaggaaaaggagaaaaagaaaagaccaatgtctcagatcagtggagtcaagaaattgatgcacagctctagtctgactaattcaagtatcccaaggtttggagttaaaactgaacaagaagatgtccttgccaaggaactagaagatgtgaacaaatggggtcttcatgttttcagaatagcagagttgtctggtaaccggcccttgactgttatcatgcacaccatttttcaggaacgggatttattaaaaacatttaaaattccagtagatactttaattacatatcttatgactctcgaagaccattaccatgctgatgtggcctatcacaacaatatccatgctgcagatgttgtccagtctactcatgtgctattatctacacctgctttggaggctgtgtttacagatttggagattcttgcagcaatttttgccagtgcaatacatgatgtagatcatcctggtgtgtccaatcaatttctgatcaatacaaactctgaacttgccttgatgtacaatgattcctcagtcttagagaaccatcatttggctgtgggctttaaattgcttcaggaagaaaactgtgacattttccagaatttgaccaaaaaacaaagacaatctttaaggaaaatggtcattgacatcgtacttgcaacagatatgtcaaaacacatgaatctactggctgatttgaagactatggttgaaactaagaaagtgacaagctctggagttcttcttcttgataattattccgataggattcaggttcttcagaatatggtgcactgtgcagatctgagcaacccaacaaagcctctccagctgtaccgccagtggacggaccggataatggaggagttcttccgccaaggagaccgagagagggaacgtggcatggagataagccccatgtgtgacaagcacaatgcttccgtggaaaaatcacaggtgggcttcatagactatattgttcatcccctctgggagacatgggcagacctcgtccaccctgacgcccaggatattttggacactttggaggacaatcgtgaatggtaccagagcacaatccctcagagcccctctcctgcacctgatgacccagaggagggccggcagggtcaaactgagaaattccagtttgaactaactttagaggaagatggtgagtcagacacggaaaaggacagtggcagtcaagtggaagaagacactagctgcagtgactccaagactctttgtactcaagactcagagtctactgaaattccccttgatgaacaggttgaagaggaggcagtaggggaagaagaggaaagccagcctgaagcctgtgtcatagatgatcgttctcctgacacgtaacagtgcaaaaactttcatgcctttttttttttaagtagaaaaattgtttccaaagtgcatgtcacatgccacaaccacggtcacacctcactgtcatctgccaggacgtttgttgaacaaaactgaccttgactactcagtccagcgctcaggaatatcgtaaccagttttttcacctccatgtcatccgagcaaggtggacatcttcacgaacagcgtttttaacaagatttcagcttggtagagctgacaaagcagataaaatctactccaaattattttcaagagagtgtgactcatcaggcagcccaaaagtttattggacttggggtttctattcctttttatttgtttgcaatattttcagaagaaaggcattgcacagagtgaacttaatggacgaagcaacaaatatgtcaagaacaggacatagcacgaatctgttaccagtaggaggaggatgagccacagaaattgcataattttctaatttcaagtcttcctgatacatgactgaatagtgtggttcagtgagctgcactgacctctacattttgtatgatatgtaaaacagattttttgtagagcttacttttattattaaatgtattgaggtattatatttaaaaaaaactatgttcagaacttcatctgccactggttatttttttctaaggagtaacttgcaagttttcagtacaaatctgtgctacactggataaaaatctaatttatgaattttacttgcaccttatagttcatagcaattaactgatttgtagtgattcattgtttgttttatataccaatgacttcttccatattttaaaagagaaaaacaactttatgttgcaggaaaccctttttgtaagtctttctttattatttactttgcattttgtttcactctttccagataagcagagttgctcttcaccagtgtttttcttcatgtgcaaagtgactatttgttctataatacttttatgtgtgttatatcaaatgtgtcttaagcttcatgcaaactcagtcatcagttcgtgttgtctgaagcaagtgggagatatataaatacccagtagctaaaatggtcagtcttttttagatgttttcctacttagtatctcctaataacgttttgctgtgtcactagatgttcatttcacaagtgcatgtctttctaataatccacacatttcatgctctaataatccacacatttcatgctcatttttattgtttttacagccagttatagtaagaaaaaggtttttccccttgtgctgctttataatttagcgtgtgtctgaaccttatccatgtttgctagatgaggtcttgtcaaatatatcactaccattgtcaccggtgaaaagaaacaggtagttaagttagggttaacattcatttcaaccacgaggttgtatatcatgactagcttttactcttggtttacagagaaaagttaaacagccaactaggcagtttttaagaatattaacaatatattaacaaacaccaatacaactaatcctatttggttttaatgatttcaccatgggattaagaactatatcaggaacatccctgagaaacggttttaagtgtagcaactactcttccttaatggacagccacataacgtgtaggaagtcctttatcacttatcctcgatccataagcatatcttgcagaggggaactacttctttaaacacatggagggaaagaagatgatgccactggcaccagagggttagtactgtgatgcatcctaaaatatttattatattggtaaaaattctggttaaataaaaaattagagatcactcttggctgatttcagcaccaggaactgtattacagttttagagattaattcctagtgtttacctgattatagcagttggcatcatggggcatttaattctgactttatccccacgtcagccttaataaagtcttctttaccttctctatgaagactttaaagcccaaataatcatttttcacattgatattcaagaattgagatagatagaagccaaagtgggtatctgacaagtggaaaatcaaacgtttaagaagaattacaactctgaaaagcatttatatgtggaacttctcaaggagcctcctggggactggaaagtaagtcatcagccaggcaaatgactcatgctgaagagagtccccatttcagtcccctgagatctagctgatgcttagatcctttgaaataaaaattatgtctttataactctgatcttttacataaagcagaagaggaatcaactagttaattgcaaggtttctactctgtttcctctgtaaagatcagatggtaatctttcaaataagaaaaaaataaagacgtatgtttgaccaagtagtttcacaagaatatttgggaacttgtttcttttaattttatttgtccctgagtgaagtctagaaagaaaggtaaagagtctagagtttattcctctttccaaaacattctcattcctctcctccctacacttagtatttcccccacagagtgcctagaatcttaataatgaataaaataaaaagcagcaatatgtcattaacaaatccagacctgaaagggtaaagggtttataactgcactaataaagagaggctctttttttttttccagtttgttggtttttaatggtaccgtgttgtaaagatacccactaatggacaatcaaattgcagaaaaggctcaatatccaagagacagggactaatgcactgtacaatctgcttatccttgcccttctctcttgccaaagtgtgcttcagaaatatatactgctttaaaaaagaataaaagaatatccttttacaagtggctttacatttcctaaaatgccataagaaaatgcaatatctgggtactgtatggggaaaaaaatgtccaagtttgtgtaaaaccagtgcatttcagcttgcaagttactgaacacaataatgctgttttaattttgttttatatcagttaaaattcacaataatgtagatagaacaaattacagacaaggaaagaaaaaacttgaatgaaatggattttacagaaagctttatgataatttttgaatgcattatttattttttgtgccatgcattttttttctcaccaaatgaccttacctgtaatacagtcttgtttgtctgtttacaaccatgtatttattgcaatgtacatactgtaatgttaattgtaaattatctgttcttattaaaacatcatcccatgatgggatggtgttgatatatttggaaactcttggtgagagaatgaatggtgtgtatacatactctgtacatttttcttttctcctgtaatatagtcttgtcaccttagagcttgtttatggaagattcaagaaaactataaaatacttaaagatatataaatttaaaaaaacatagctgcaggtctttggtcccagggctgtgccttaactttaaccaatattttcttctgttttgctgcatttgaaaggtaacagtggagctagggctgggcattttacatccaggcttttaattgattagaattctgccaataggtggattttacaaaaccacagacaacctctgaaagattctgagacccttttgagacagaagctcttaagtacttcttgccagggagcagcactgcatgtgtgatggttgtttgccatctgttgatcaggaactacttcagctacttgcatttgattatttcctttttttttttttttttaactcggaaacacaactggggaaatatattctttcccagtgattataaacaatctttttcttttttttaagtccttttggcttctagagctcataggaaaatggacttgatttgaaattggagccagagtttactcgtgttggttatctattcatcagcttcctgacatgttaagagaatacattaaagagaaaatactgttttttaatcctaaaatttttcttccactaagataaaccaaatgtccttacatatatgtaaacccatctatttaaacgcaaaggtgggttgatgtcagtttacatagcagaaagcattcactatcctctaagatttgtttggccagcccctaaagcaggaaacatttataatggattatatggaaacatcctcccagtacttgcccagcccttgaatcatgtggcttttcagtgaaaggaaagattctttttctaggaaaaatgagcctattttattttattttattttattttttgacacaaactgtagattttagcagccctggcccaaaggaatttgattacttttgttttaaacagtacaaaggggacactataattacaaaaacatccttaactgatttgagttgtttttatttctttggatatattttcagagtggtaaattgtgtgtgagaattacaaatgattattcttttagtggtttcttagcctctcttacagcccacggggatagtactgtacatcaataccttcatatgaaatttttatatgcaatgaaaataaaagcatgggttgattctgcctatttatgactcaatcttttacaaataaaagattattcattttaaattatagttcaatcagcatgtctcttaggatactgaacgtggttgaaatgaaaggatagtgacatcataagttacttgagacatctggagaaactgaggaaaagtgagagagtaggcagggcctggagccgcagagccattgctaaccatcctgtgtgagatatcccccattctgtagctttattctcataaccctgctcaattttctttataacacttctcacagatttatatacgtgtttgtttttgttatctgtctctcccaccagaccacagctccatgagagcaaggtctttgcttaccaatatatcactagcacttaaaactatgcctggtacacagtaggttcttaatatgtgttgaatatagccatcaaattgatattggatataattcaatctgataagatattttgagatattaaagagtttttaacttgataccataaaa

SEQ ID NO: 1705 - protein, 583 aa, Homo sapiens
MKEQPSCAGTGHPSMAGYGRMAPFELASGPVKRLRTESPFPCLFAEEAYQKLASETLEELDWCLDQLETLQTRHSVSEMNKFKRMLNRELTHLSEMSRSGNQVSEFISNTFLDKQHEVEIPSPTQKEKEKKKRPMSQISGVKKLMHSSSLTNSSIPRFGVKTEQEDVLAKELEDVNKWGLHVFRIAELSGNRPLTVIMHTIFQERDLLKTFKIPVDTLITYLMTLEDHYHADVAYHNNIHAADVVQSTHVLLSTPALEAVFTDLEILAAIFASAIHDVDHPGVSNQFLINTNSELALMYNDSSVLENHHLAVGFKLLQEENCDIFQNLTKKQRQSLRKMVIDIVLATDMSKHMNLLADLKTMVETKKVTSSGVLLLDNYSDRIQVLQNMVHCADLSNPTKPLQLYRQWTDRIMEEFFRQGDRERERGMEISPMCDKHNASVEKSQVGFIDYIVHPLWETWADLVHPDAQDILDTLEDNREWYQSTIPQSPSPAPDDPEEGRQGQTEKFQFELTLEEDGESDTEKDSGSQVEEDTSCSDSKTLCTQDSESTEIPLDEQVEEEAVGEEEESQPEACVIDDRSPDT

SEQ ID NO: 1706 - DNA, 6910 bp, Homo sapiens
actgcacaaaggaaatgccctcactcagctacaagtgcctcctgctccgtgcggggcctcagggccccagagccccgcaccagctctgacttctcgtggttcctggggatcttggcatcgtccttaaaaatggcttttgtttgggatcctctgggagccacggtgccaggaccatctacaagagccaaatcaagattgcgtttctcaaagtcctacagttttgatgtggacaatggcacatctgcgggacggagtcccttggatcccatgaccagcccaggatccgggctaattctccaagcaaattttgtccacagtcaacgacgggagtccttcctgtatcgatccgacagcgattatgacctctctccaaagtctatgtcccggaactcctccattgccagtgatatacacggagatgacttgattgtgactccatttgctcaggtcttggccagtctgcgaactgtacgaaacaactttgctgcattaactaatttgcaagatcgagcacctagcaaaagatcacccatgtgcaaccaaccatccatcaacaaagccaccataacagaggaggcctaccagaaactggccagcgagaccctggaggagctggactggtgtctggaccagctagagaccctacagaccaggcactccgtcagtgagatggcctccaacaagtttaaaaggatgcttaatcgggagctcacccatctctctgaaatgagtcggtctggaaatcaagtgtcagagtttatatcaaacacattcttagataagcaacatgaagtggaaattccttctccaactcagaaggaaaaggagaaaaagaaaagaccaatgtctcagatcagtggagtcaagaaattgatgcacagctctagtctgactaattcaagtatcccaaggtttggagttaaaactgaacaagaagatgtccttgccaaggaactagaagatgtgaacaaatggggtcttcatgttttcagaatagcagagttgtctggtaaccggcccttgactgttatcatgcacaccatttttcaggaacgggatttattaaaaacatttaaaattccagtagatactttaattacatatcttatgactctcgaagaccattaccatgctgatgtggcctatcacaacaatatccatgctgcagatgttgtccagtctactcatgtgctattatctacacctgctttggaggctgtgtttacagatttggagattcttgcagcaatttttgccagtgcaatacatgatgtagatcatcctggtgtgtccaatcaatttctgatcaatacaaactctgaacttgccttgatgtacaatgattcctcagtcttagagaaccatcatttggctgtgggctttaaattgcttcaggaagaaaactgtgacattttccagaatttgaccaaaaaacaaagacaatctttaaggaaaatggtcattgacatcgtacttgcaacagatatgtcaaaacacatgaatctactggctgatttgaagactatggttgaaactaagaaagtgacaagctctggagttcttcttcttgataattattccgataggattcaggttcttcagaatatggtgcactgtgcagatctgagcaacccaacaaagcctctccagctgtaccgccagtggacggaccggataatggaggagttcttccgccaaggagaccgagagagggaacgtggcatggagataagccccatgtgtgacaagcacaatgcttccgtggaaaaatcacaggtgggcttcatagactatattgttcatcccctctgggagacatgggcagacctcgtccaccctgacgcccaggatattttggacactttggaggacaatcgtgaatggtaccagagcacaatccctcagagcccctctcctgcacctgatgacccagaggagggccggcagggtcaaactgagaaattccagtttgaactaactttagaggaagatggtgagtcagacacggaaaaggacagtggcagtcaagtggaagaagacactagctgcagtgactccaagactctttgtactcaagactcagagtctactgaaattccccttgatgaacaggttgaagaggaggcagtaggggaagaagaggaaagccagcctgaagcctgtgtcatagatgatcgttctcctgacacgtaacagtgcaaaaactttcatgcctttttttttttaagtagaaaaattgtttccaaagtgcatgtcacatgccacaaccacggtcacacctcactgtcatctgccaggacgtttgttgaacaaaactgaccttgactactcagtccagcgctcaggaatatcgtaaccagttttttcacctccatgtcatccgagcaaggtggacatcttcacgaacagcgtttttaacaagatttcagcttggtagagctgacaaagcagataaaatctactccaaattattttcaagagagtgtgactcatcaggcagcccaaaagtttattggacttggggtttctattcctttttatttgtttgcaatattttcagaagaaaggcattgcacagagtgaacttaatggacgaagcaacaaatatgtcaagaacaggacatagcacgaatctgttaccagtaggaggaggatgagccacagaaattgcataattttctaatttcaagtcttcctgatacatgactgaatagtgtggttcagtgagctgcactgacctctacattttgtatgatatgtaaaacagattttttgtagagcttacttttattattaaatgtattgaggtattatatttaaaaaaaactatgttcagaacttcatctgccactggttatttttttctaaggagtaacttgcaagttttcagtacaaatctgtgctacactggataaaaatctaatttatgaattttacttgcaccttatagttcatagcaattaactgatttgtagtgattcattgtttgttttatataccaatgacttcttccatattttaaaagagaaaaacaactttatgttgcaggaaaccctttttgtaagtctttctttattatttactttgcattttgtttcactctttccagataagcagagttgctcttcaccagtgtttttcttcatgtgcaaagtgactatttgttctataatacttttatgtgtgttatatcaaatgtgtcttaagcttcatgcaaactcagtcatcagttcgtgttgtctgaagcaagtgggagatatataaatacccagtagctaaaatggtcagtcttttttagatgttttcctacttagtatctcctaataacgttttgctgtgtcactagatgttcatttcacaagtgcatgtctttctaataatccacacatttcatgctctaataatccacacatttcatgctcatttttattgtttttacagccagttatagtaagaaaaaggtttttccccttgtgctgctttataatttagcgtgtgtctgaaccttatccatgtttgctagatgaggtcttgtcaaatatatcactaccattgtcaccggtgaaaagaaacaggtagttaagttagggttaacattcatttcaaccacgaggttgtatatcatgactagcttttactcttggtttacagagaaaagttaaacagccaactaggcagtttttaagaatattaacaatatattaacaaacaccaatacaactaatcctatttggttttaatgatttcaccatgggattaagaactatatcaggaacatccctgagaaacggttttaagtgtagcaactactcttccttaatggacagccacataacgtgtaggaagtcctttatcacttatcctcgatccataagcatatcttgcagaggggaactacttctttaaacacatggagggaaagaagatgatgccactggcaccagagggttagtactgtgatgcatcctaaaatatttattatattggtaaaaattctggttaaataaaaaattagagatcactcttggctgatttcagcaccaggaactgtattacagttttagagattaattcctagtgtttacctgattatagcagttggcatcatggggcatttaattctgactttatccccacgtcagccttaataaagtcttctttaccttctctatgaagactttaaagcccaaataatcatttttcacattgatattcaagaattgagatagatagaagccaaagtgggtatctgacaagtggaaaatcaaacgtttaagaagaattacaactctgaaaagcatttatatgtggaacttctcaaggagcctcctggggactggaaagtaagtcatcagccaggcaaatgactcatgctgaagagagtccccatttcagtcccctgagatctagctgatgcttagatcctttgaaataaaaattatgtctttataactctgatcttttacataaagcagaagaggaatcaactagttaattgcaaggtttctactctgtttcctctgtaaagatcagatggtaatctttcaaataagaaaaaaataaagacgtatgtttgaccaagtagtttcacaagaatatttgggaacttgtttcttttaattttatttgtccctgagtgaagtctagaaagaaaggtaaagagtctagagtttattcctctttccaaaacattctcattcctctcctccctacacttagtatttcccccacagagtgcctagaatcttaataatgaataaaataaaaagcagcaatatgtcattaacaaatccagacctgaaagggtaaagggtttataactgcactaataaagagaggctctttttttttttccagtttgttggtttttaatggtaccgtgttgtaaagatacccactaatggacaatcaaattgcagaaaaggctcaatatccaagagacagggactaatgcactgtacaatctgcttatccttgcccttctctcttgccaaagtgtgcttcagaaatatatactgctttaaaaaagaataaaagaatatccttttacaagtggctttacatttcctaaaatgccataagaaaatgcaatatctgggtactgtatggggaaaaaaatgtccaagtttgtgtaaaaccagtgcatttcagcttgcaagttactgaacacaataatgctgttttaattttgttttatatcagttaaaattcacaataatgtagatagaacaaattacagacaaggaaagaaaaaacttgaatgaaatggattttacagaaagctttatgataatttttgaatgcattatttattttttgtgccatgcattttttttctcaccaaatgaccttacctgtaatacagtcttgtttgtctgtttacaaccatgtatttattgcaatgtacatactgtaatgttaattgtaaattatctgttcttattaaaacatcatcccatgatgggatggtgttgatatatttggaaactcttggtgagagaatgaatggtgtgtatacatactctgtacatttttcttttctcctgtaatatagtcttgtcaccttagagcttgtttatggaagattcaagaaaactataaaatacttaaagatatataaatttaaaaaaacatagctgcaggtctttggtcccagggctgtgccttaactttaaccaatattttcttctgttttgctgcatttgaaaggtaacagtggagctagggctgggcattttacatccaggcttttaattgattagaattctgccaataggtggattttacaaaaccacagacaacctctgaaagattctgagacccttttgagacagaagctcttaagtacttcttgccagggagcagcactgcatgtgtgatggttgtttgccatctgttgatcaggaactacttcagctacttgcatttgattatttcctttttttttttttttttaactcggaaacacaactggggaaatatattctttcccagtgattataaacaatctttttcttttttttaagtccttttggcttctagagctcataggaaaatggacttgatttgaaattggagccagagtttactcgtgttggttatctattcatcagcttcctgacatgttaagagaatacattaaagagaaaatactgttttttaatcctaaaatttttcttccactaagataaaccaaatgtccttacatatatgtaaacccatctatttaaacgcaaaggtgggttgatgtcagtttacatagcagaaagcattcactatcctctaagatttgtttctgcaaaactttcattgctttagaattttaaaatttcaccttgtacaatggccagcccctaaagcaggaaacatttataatggattatatggaaacatcctcccagtacttgcccagcccttgaatcatgtggcttttcagtgaaaggaaagattctttttctaggaaaaatgagcctattttattttattttattttattttttgacacaaactgtagattttagcagccctggcccaaaggaatttgattacttttgttttaaacagtacaaaggggacactataattacaaaaacatccttaactgatttgagttgtttttatttctttggatatattttcagagtggtaaattgtgtgtgagaattacaaatgattattcttttagtggtttcttagcctctcttacagcccacggggatagtactgtacatcaataccttcatatgaaatttttatatgcaatgaaaataaaagcatgggttgattctgcctatttatgactcaatcttttacaaataaaagattattcattttaaattatagttcaatcagcatgtctcttaggatactgaacgtggttgaaatgaaaggatagtgacatcataagtta

SEQ ID NO: 1707 - protein, 685 aa, Homo sapiens
MAFVWDPLGATVPGPSTRAKSRLRFSKSYSFDVDNGTSAGRSPLDPMTSPGSGLILQANFVHSQRRESFLYRSDSDYDLSPKSMSRNSSIASDIHGDDLIVTPFAQVLASLRTVRNNFAALTNLQDRAPSKRSPMCNQPSINKATITEEAYQKLASETLEELDWCLDQLETLQTRHSVSEMNKFKRMLNRELTHLSEMSRSGNQVSEFISNTFLDKQHEVEIPSPTQKEKEKKKRPMSQISGVKKLMHSSSLTNSSIPRFGVKTEQEDVLAKELEDVNKWGLHVFRIAELSGNRPLTVIMHTIFQERDLLKTFKIPVDTLITYLMTLEDHYHADVAYHNNIHAADVVQSTHVLLSTPALEAVFTDLEILAAIFASAIHDVDHPGVSNQFLINTNSELALMYNDSSVLENHHLAVGFKLLQEENCDIFQNLTKKQRQSLRKMVIDIVLATDMSKHMNLLADLKTMVETKKVTSSGVLLLDNYSDRIQVLQNMVHCADLSNPTKPLQLYRQWTDRIMEEFFRQGDRERERGMEISPMCDKHNASVEKSQVGFIDYIVHPLWETWADLVHPDAQDILDTLEDNREWYQSTIPQSPSPAPDDPEEGRQGQTEKFQFELTLEEDGESDTEKDSGSQVEEDTSCSDSKTLCTQDSESTEIPLDEQVEEEAVGEEEESQPEACVIDDRSPDT

SEQ ID NO: 1708 - DNA, 22914 bp, Mus musculus
  misc_feature (1)...(22914): n = A,T,C or G
tctgtctgtctctgccctgcctggatccatgcttctgtcaccacaccatcccgacatgaagaactctatccttaaactctgaatctaaataaagtctttcttgcttaaactgttaacccatggggaaatctgcatgaagatgcagaaccagaaaaagtaatggtcttactctacaaatgctggtgagactgtggagtaaaacagaattcctccgtctccaaagacaccaggaagcatgctcctggatgattggggtcaacacccagacacgctacatgaggaaaaaaaacctcagcccctccatcaactccatatatagctgatatacttagaggctggaccctgacacctcctgggggtttagttctccaatgcttgggatgacgtggctctcaacagctgctctgttttgacctgcaccctgtgattggattgcattttgctgtcagcatctccacttctcctctatgtggtcagggcaattgcatttctatacaactataaaagacggagcagtgcttggtacttagtgggagctctttacatgttataaaagcacagaaggacaaccagggtagccagatccaaacacatgctagtagcagatgggtttttaaagatttttttgtttattttatgtatatgagtacactgtagctgtcttcagacacaccagaagagtgcattggaccccattacagatggttgtaagccaccatgtggttgctgggaactgaactcaggacctctggaagagcagtcagtgctcttaaccactgagccatctctccagccccagtagcagatgttttataggcttccttgaattctttgtctctaagctgcttcttctgaggaaagatgtacagacaagcttctatctccaacaggctgttgtcagtcatgcttcaagaacaaagacaccctagcttctgaagccagctgtgccaggttgacaaaaatctcacctctccagcccccgggctctcagagggggttgacctcctctgaagcagtggctgcttcatggtcaagggcaccaaggctgtgaccatccttctccatcctcatgtttcccctggcctcaaagccttgttcatttccacatcgctcctggttctccgttagcttttacctcttgcaacatcttgggttaaggaatcctgtttgtcttgtacaccatagcttctagaaggtcgatcacaagacaagacagccagctctgtgagctcttcatccttggaggattctgtccccttcacatggcattggataaaggacaggctgggacttcccttcgactctcctttggcatttgaggatgaaggatcatcccagcactcaggaggcaggcaaacctatgagtttgaggccaacctggtctacagaggaagttccaggacagccagggctactcagagagatcctgtcttgaagggagaaatgttatagactagcacagaaggcacacatcacgctggaatcacggacttgactttgagtcctgaatatcacacttagcacctatggaaagctaacttttgaatccagctgatcttgttctcgaacctaaaaggtaaagcagcatctatgcctagctcacctggtagagacaacgattgagggctacagtctcttaagcagatgggcgcagcaagtgctgataatgagaatggtaatgctgtcctctacgggctgactccattgcctctctggctctgtctgctgcctcctgtcctgcctcattcctgctccaaccacagcgatctctctgtgttgtcccctcccctccccacccccacccccgtgcagggctacgcaggccccagggcctttgcactgtgcatctttgcactgcacaggcgtctgacaggcactgtgcacagtggtccacctggttactgtccactagaagtcctggtgcaaatgctgcctttccgctctgctgctcattccgtggcacccatgccatagtagtcatggcttgtccgtctttgtgtgaccaccctacacaagctacatgaaggctggacagagctgaagccctgagcgctgaaacaaaagcgctagccccacacccaactgctactccatgctcttcatttgatatgatttgcatttttcttctcccaaatgcccagtgtggtcatttttggtggtgaggccttcaaaggcaattaaagagtcatgagtgctcccctttcgtgattgggatcaggcacttctctttctctcttttctcttcttttcttttcttcctttcattcattctttttctttttgttttttgtttgtttttatttctgatttggtttggtttggtttggttttttgagtcaggatttaatctgtatatccccagctctcttggaacttgctctgtactccaggctgacctccaactcagagattccccctgcctctgcctcctaagtgctgggtttaaaggtgtgtgccacaaccttccagtgagattaggcactcttacaacaattcttaaagaatgggtgcatttgtgtgtacagatacgtgtgtgtgtgtgtgtgtgagagagagagagagagagagagagagagagagaggggtggggtggggtggggagacagagacagagagtcatgggtgctggaatctgatcgcaggtcctttggaagaacaatgtgttggtttaaatgactctgctcccataatatctcaggcatttgaatacttgttccccagttggcagctgtttggggaagattagtcggtatggctttatttctggagggagtatgtccatggagacaggtttgaggttctaaactcatgccattttgtatttgtccatgttctctaaaggaacagaactgatggggataaaggggtttgttagcgtggcttacaggctgtgggctgagaaacccagcaatgactacctcctgctggtggttgttcagttcacaagactgaatgtctctgctgctggagctgcaggaaagtcctagaggctgattctaggctgggatcctgaggaagcaggtctaatgatggctcaggaacaggatcctgattaacttgccagtgacagagtgagagcaagcaggcaaagcacaggcgattccttcttctatgtccctttatgtgggctgacataggaagaggtcgatcagattcagggtgggtcttccaacctcaaatagtccaatcaagaaaagtgctctgaggccagcctggtctacagagtgagttccaggacagccaaggctacacagagaaaccctgttgaaaagagaagagaagagaagagaagagaagagaagagaagagaagagaagagaagagaagagaagagaagagaagagaagagagaaaagaactcacaggtgataattaccaaacttagacatcaccagaacataccagaaaaaaacagacccctcccccctagactgaaaaaaagaaaaagtacttttctctgccatccttgttaaggtttggtctgatgtaatatattacaatgttaaatactggcccccaaggtctggttgctccctccagggacaaggcaatccttgtacaccaagtgatactatgtaaccttgctccttcatttaaaactattggttgaataaagatgcctacagcctatagcttggcaaaagagaggtaggcacagtttcagttcctgggcttgaagtctgaggaaggactatgagggagaagaaagagaaggtaaagagagaggaagacaccatggggtaagggatggtaagaactggccatgagggtgggccagccagggagtaagagtggcccaggaggaacatggcaagtcatatctcggggttattgacagtaaagcagacaaaataacttaaagggttgatatctccccatctctaatgataataaggcttattacgaatataaaaattgtgtatcttttatctgagaactaaatgatctaaggtggggtagaaactcctgattgatgttaaatatttacaatgatacatccttagtagcaaaaaagacatagacattataccttagctagacactcacataactgtggcagacacccatccgggcgcacactccagaagcagatgacatcctatttaatcgtccatagtttcaggggcttctgaatgccgcccttttgtcaaccactaaggaaactgaagaccagtgaggctctgtgatttgctgaagggtcagagctggtggcttcagcttgtacccaggcactccaacttggaagcaagagctttgagccattgctctgtactgcttgtgcccaacagatcgccacaggtgggtggaagagagaacatatctacccatgaagggaagctgtgcacttgagagtatgtgctgaactctttctgaactgggggttggcaagacaccaggaaggcagtacagaaagcctttttccccaggtggaccttgagatgtggaagtcaaatatctgaatttagaaaatgggctgaaggaaaaaaaaaaaaaaaaacccagcccccaaaccctgccctttgtttaccaaataccagcaaaacttgtctgactttaagtactttaaataccacttagatttggagcttaagcactgtagaagaaaagattcataagtaaatataatttccagtggcatcaaactgagcttaaacatttcctaagggcccaacacagttgtctaaggttggtggcaattcactggctttgtttgccaaaagactctacaaacaaatgccatgctcccacttgaatccccacccttgatctggggtaaggggagggtgaaatgttgtctgaagctgaagtcccaaactggaggaggaaaatcccccaaatctttgtctccttcttattaatcaaatattcccttgttccctttacagagtgtacttgcaagtcttttattgcatcagtgttcatgagggagattggtttgtgatcttcttgctttgttgagtctctgtgtggcttgggcatcagggtgtctgggctcataaaatgaatttggcattgttccttctgttgctattttttgagaaataacttgaggggtattgtcgttagctcttctttgtaagtctggtagaatcctgtgcccaaatcatttggcctcgatggttttttcgttggaagacattttatgatggcttctatttccttaggggttataggtctatttaagttgtttatctgatcttgatttaacttggataggtggtgtctatctgcccggggcctgcccagccttttggggtttggagcagaaggaagacacaacgttggataagggccaaaagactgataatctctggccctttggctctctctagatgctagaagctgatggcttctgaaaatataacattttcttgtttgtcccgtggctaaaatctgcagacttctcttccactctccgtgctttattaactttgttttttaaagaactttttagattttatgtatatgagcacactgtcactgtcttcagacacaccagaagggggcgtcagatcccatgacagatggttgtgagccaccacgtggttgctgggaattgaactcatgacctctggaagagcagccagtgctcttaaccgctgagccacctctccagctccctttacttaattctttatggttaaatgagcaccaaggaaacttactctttcttactgttctgtgcctcactaagcactggggaaacaactcgttattaatgctttattgtgctttagtaagtgctagtgtctgtcgattaccccatgatgtttagcagtggggaaattaagtaagtggatttatggctagtgctcctttctctggagtcagccaggagctcttgctaggccagggagctcgttaaccctttctgaaccagagagaaaaaaggaaagggaagatgtcactcatatggacacatacacaccggttgaagtggaaagtggctgtacccatacatttggatggatgaatggatgggtgggtagatggacagatggatggatggatggatgaggaagagcccccaagccaccactttatttcttctctctttatataccttcttatactttcttaggcaaaagttcttcagaaaattacttcacagataaaatgttacacaaaatgggggagtttcagaaaagcataacgagttcaaagccgtgcttcacactgtaagctcattatatgtaagttcaaagcaaccgttttcacaaggccttgccttatcatagtgcacactcgtggcttcatccttggacctgaacgttttttccttgaacacaaatatgtcccaagcctatttctctatttaatgtaattacaaaagctcattgtatttcctattatgcagcctattcttgattctaactttattagatctttctggcaaaacaactaaaaccatctcttaaaacttccttcctaaggttatttgaatcaaattgggaagtctagaaaatcattagtccatctaaccagtgttaactcatgaaagctcatctttatgttgatctgcaaggaaaatctgctcaatagggtgggctgatgcccaggaatccttagactatgtagtagtgatgggaaaggcatatcagctgcaagaaacaatcctgagatgaagtctcttgggatcctgccttatcccagagctcatccattttaggccatgctccatccacaaagcggtacagtgtggatggagaagcaaggctaaacttgagtctcagatgtgtattttactgcctatgacctcagtttttacctctgtgtgcctcatctctaagaatggctataacaccagaagctgaactgtggagctgctgtaagactgaagcatagccctatgcacagatagatatacacagagaataaagtacttgccacataccctttatgtaattattagctataactttccagcttctgtcctcctcttctctgcaagggccattcttcgttagacaggcccttatacacatctgcagatgtcccaggactgctgccagatcctcctacagcctgtttttacttagaatactcttgtccagccctcctcttctgcctccctccctcccccctaccttggtttttaccatcaatttttcattactctttccagaacagtgaggctgatcctgctgtgaagttgcagggctcagttgaatttgaatatcagataaaagaatagtctgttgggggttggaagatggctcagaggttaagagcactgattgctcttccagatgtgctgagttcaagtcccagcaaccacgtggtggctcacaaccatctgtcatgggatctgatgccctcttctggtgtgtctgaagacagctacagtgcactcatatatataaaataaataaatctttttaaaaaaaatctttaaaagatagcttgctgttccatatagtacagtgtttcaggtaatatcaaataaacatttttctcttgtagatatgtctcatacaatttctgtgacatccttatgagaaatgcatttgttgtttatctgacatttgaatttaaattgatatcttgttgatatcttggtcccctcccccatcacatttcagtccttttttgtttgtttggttttgggttttttttttttttttttttttttttggctttttctgagacagggtttctctgtgtagccctggctgtcctggaactcactctgtagaccaggctggccttgaactcagaaatccacctgcctctgtctctgtctcccgagtgctgggattaaaggcgtgcaccatcacgcccggctcacatttcagtcctttaagaatggcacatggctctttgtttatcccacctgaacaccagctccttgcaggttccacacagcaggcgacacagcaagcactctgccaaagctgaataataggtccttcaagctgagactcaggcagtgtctgttgggattgactctaagtacaggccttgggggaaaaaagtctgttcagcatggagagccttaccacacacagatggcctgatcagtcttcagtttcccccagcagaacaacattcttgacccccctggatcaggttcaagaggactctactattttgcatttaaaaaggactttctcttcaagagggtctcccaacaactggagtgggagccgtccctgactgttgtctgcttgtggctgccttgtctggccacagcgggagagcttgtgcccaggcctgcaggggcttggtgtgtcaggatgggttagtactcagagggagagggcggccccttctcaatgcagggaaggagggggaaggggcgatgtgaggcggtaactgagaggaggaggagctgcgatagggatgtaaagtgaataaataaaataaattaacgggggggggggggagtttcaagatttctcatcgatgttacttgactcgcaaggcaagtaatatccttttacagacgacgaaatggagaccgaataatgtcttgctgaacaagatcattaaataggtacactctggatcctactgatgaggtgctttgtgctctttcccgctggaccaagaggcagaatcagagcgttcctagatccttcctcctcacccagaaaactcttctaggaagaggtctgctatgtggcccccttgctgtggattcggttgatctccccgtaatgttacccatcaacagcctgagaggagacagaaagccaggcacttgcatgtagaaaactcctctcaggtgattctcagcaaccccgcgtcacacaagtgctgcaatttaaagcgccttcagaatcacagagaatagaaacggaggcgagaagctgaaatccagccctttcccctcacctgcttctctggcaagtttctagggggaggatttgcacgtggactccaacaatttccagctgtctttggaataagtgaggacggccgcgtgtgcagaactcacagcgccttaacgtctcttttaaatcaggaccggagtttggagtacacgggttgagaatggagaaggtgtcacattctacctttctctcttgtccccgcgcctccccctcccccaactctgcattcctttgatttccctccatcctaccctgggcacaaagaataacctagaaaggtagagggttaaaagctaatgacccaaagcagaacacactgtgagcaattccacagaaatgccacctgtgacattaaggccctaaacggctgcagccttggcgtgtttggctcgggatgaaaagtgcggggcaaagtatccagagggcagcgggcttgtgcgacggtcatttgaagtaacttcctacgtttttggatcacaaatacctgtctgacaggacgggctcccacatacttaacagacgttagcgacgcgccaaagttctccttccctgggccagcggaatgaaataaaatagtcgcaaatcaagtccttttatgggtcactgaagaaaacctagcctgatcttggtccggagctcagaggcggacccacctggatgagggttggcataaaagatgatcacaccaggccagacaatctaaccaaggaccaggttccccggagcagcctttccctttttccgggggcggctgaaccgctcagacggcccatggctcccctaggtggccagtgatctttacgctcttccaccgagctcaagcagctggcgccaggacccgggctgcggttgccacggtgacgacagacgcgcggagcctgcagctgaaggcgggtgagaggcgggagttgcaacgcctcctccccctgcaaccagcgcgggggccacgcgttgctcgcacgcgaggggtgtggctctgcctccgggaaagcgcggcccgtgggcggctcggggctcagccagtgagaggccgggggagtggtggagggaaggcacagtccgggtacttagagctgcgccgccagcgggaccggatcttcctcgcagctctcgcgccgacgctccgggcgtcgtagacgctaggagcgctacccgattgtaacatggttaccccttgccctgccagcccgggcagccccgccgcgggagccgggaggcgagacagccaccagaacctccgcgccccagtgaagaagagcagacgcccgtgcctccggagaaagaagccgctgcggccgctgaacgcgtgttcgctcccgggagactcgggcgtctgtgaccttttcgagtcccccagctccagctcggacggcgccgacagccccgcagtgtctgcggcgcgggactgcagctccctactcaaccctgcccagcccttgacagcgctggatctccagaccttccgagaatacggccagagctgctacgacttccgaaaggcgcaggagaatcttttccacccgcgggagtcgctggcgcgccagccacaagtgaggcgctggcaagagccagacccggggccgtcgcgcttctgtctctcccaggctagctcgctctctccatggctgctggctgcccttcgcacagccctagtcattgcagcccattatctgccatcagtaggagcaattgggaccttcaaggattggcccactgacctatttagatggagaaaggttgtgggtggagaggtggatatcggaagttatagggggtgggtagaggagttttattataacgcagttcgacagcttctacgtcagatccagaactcctaaatttgcttgcacttctgtttaaaaaaaaaacaaaaactttaccccccaccccccaccccttatagtccctttgacttgctgagagggttagactgggtagtgtgccctaatgcactgtgcacaataccaggcgcgagcccaaacgttcccaggcgttccggaacgcctggtttaaggcaggcccgtacctccccccctcccccccacgtgcctcctatttttcagtcatttagcgttttcccctttgcctctctgcctctctggattgttttgttcgggcgcgcgcttcagcacactccccctctcgctcccggccaggtgactgccgaatcgcgctgtaaactgctcagctggctcctgcaagtccaccgccagttcggcctctctttcgagtcgctgtgtctgaccgtgaatactctggaccgttttctcctcacgacccctgttgctgcagactgcttccagctgctcggggtcacctgtctgctcatcgcttgcaagcaggtaccaccaggcgaaagagtgcgatgtgtttgcagccagcgccccccttccccaactcgtgcatggcttagggctgggttgcttggcttatctgggcagatgctcgaagatctttccatgtcatagccttaacttctcttaccactcacagcaacaatcctttcagactacaaagaggttaggctgtagctggccgcccaaccaaagctttgtggtacttgtctctggaaaagatgcttttaaagtcaatctctctctctctctctctctctctctctctctctctctctctctctctctctctctctctctcacacacacacacacacacacacattttaaagttgggttgtagatagagaaggtgcactagcagctgtgggtggggggagaggtttcaggagcggaattgtggaagtggaaggaatatagagttcgagtcccagttttctcccgggttttaggctggatggatttgggtcccaggtacccaccagtccggaactggagcacactctgtgttgcaggtagaggtgcacccacctcgcttgaaacagctcctggccctgtgcggcggtgcgttctcccggcagcagctgtgcaacctggagtgcatcgtgctgcataagctccacttcagcctgggcgcgcccaccatcaacttcttcctggagcacttcactcagtggcgcatggaagccggccaggctgaggtcaccgaagctctagaggctcaaaccctggcccggggagtggcggagctgagcctaacggattacgcgttcactacctacacgccgtccctgatggctatctgctgcctggcgctggctgacggattgctgcagcaccagcacgagatggacctgcgcctgggagagcacccagaggccacactgcaagactgtctgggcaagctgcagacgctagtgtccatcaatagcagctccctgcctcgcattctgcctccccagatctgggagaggtgcagcctgccccagagttggcaataaaaagcacccccttgagctcctttttaaaattccctggtccctgctccgtgccttaaggagaatatgcagtacagatccaaagagaagttgaggtctcctacctgtaaatactgtacaataacggattctttatttattttgtagtacacaagggcaggggtgacagttctggcttgtctaaatgctgctgttggcatgcctgactgtctgcttttcccaggcgaagtccatcacgaggtagccaattccggaggctcttccctgctcccacagttttactttgtagttagctctgtgaaaacaacctggcaagattttatatgccactgttccagaaagcagacaagtcaaggtggcttgtccgtatcttaaccccctccagtcaggaggctgagttccctcccccatgccagtggcccaaggagaatgagacagggttagaagtcagagtggtctgtgctgtccggaaaggcagtggctgcactaactgatgtggagctgggaagctttggggaccgggcagccatactagcagtgggtgaagcaagagacagtccctggtgcaacacaggaaatgctggaatgccttttgcgtattgttatagctgttgcaacctgggtcatttcctctgcagctacactcatggttcagtttatactgcagcatgagcccagggtaattctggtacggcagtaataaatattatactatttgcaacatatcctgtgtgcgacaattattttactcttggagaatgctttggaacagtcttgtcccactttccagaggctgacactgggacacaggacttggaggcaatgccatccatgagtcttaaccattagccacattgctaagctccccccccccccccgtttgtttttggaaattctaacgccctcgttctccatttagcgcccctgaactctgttcagttgtcttctaagccttgctccaggactctctagataggaaacttggccgagaagcaagcagcaccctagggtactgtggttctgcagttgtcacatgatctttagactcattgtcattaatcagctgtaggctctgaccctcagctccaccacctgcaacaaattcttgaatttcattgaacctcacagtggacctgtgtgtgtgtgtggggggggggcgtgttaagcttaaaagggatttgtttctgtagtgggggtgaggaggatagtagccatggagccattttgctaggagatctaaggcccacttctctaaaactgggataatggcacccatcagagttgcacctccttcccaagcacagatcctaatagaacccccaagaagcaacagcctagcctgcacagtgctaggaggagagaagttatgaaggaaaacaaaaccaaacctaattagggtggaagaagccaacttgaacatttagagctttttcatccctccagagaccggacctttctgctctctggatatgtatgctctcttctcgggactggaacacttttctgtgatggtgaaaggggaggggttgaggaccctgtcacctgtctaacaactatctggggtcctcagtgacaagggggcccttgaagactggccctcgtggaaagaagcaattctgggggtttatcttcactagtgtctgacagtcaaacttcctctgacactttcatacctgtctcctaaattttccagaactagggaacagagccaggggcgggctatgggaggctggaagtttaactgaaaaggctgatttaaaaaagaagannnnnnnnnnnnnnnnnnnnnnnnnnnnnnnnnnnnnnnnnnnnnnnnnnnnnnnnnnnnnnnnnnnnnnnnnnnnnnnnnnnnnnnnnnnnnnnnnnnnnnnnnnnnnnnnnnnnnnnnnnnnnnnnnnnnnnnnnnnnnnnnnnnnnnnnnnnnnnnnnnnnnnnnnnnnnnnnnnnnnnnnnnnnnnnnnnnnnnnnnnnnnnnnnnnnnnnnnnnnnnnnnnnnnnnnnnnnnnnnnnnnnnnnnnnnnnnnnnnnnnnnnnnnnnnnnnnnnnnnnnnnnnnnnnnnnnnnnnnnnnnnnnnnnnnnnnnnnnaagaagaagaagaagaagaagaagaagcaggaggaggaggaggaggaggaggaggaggaggggctggtgagatggctcagtgggtaagagcacccgactgctcttccgaaggtcaggagttcaaatcccagcaaccacatggtggctcacaaccatccgtaatgagatctgactccctcttctggagtgtctgaagacagctacagtgtacttacatataaataaattaatctttaaaaaaaaaaaaagaagaagaagaagaaaaccaaattgtctaagtaacagccattgtacatacatacataagctaactcaccttcacaaccctgctgaggtaggccttattttaaaggcctagtgatctggtggagtttaatctccatacttgtgcgttctcacatggaagccagagcggtctctctctctctctctctctctctctctctctctctctctcacacacaccccccacaacctcacagctcagatgcacaccttaactcagttcttataaataggtgtctctaagtcttttcacccattatccaccactgctaagaatatattgattcttaattcagctaatgggtgcaaatcaaaaggtctttcacatatattacttgatatagggcaagagcaaggtgcccagcagaaaggtacacaaatttctatttcagatgcttgtttacattggactgatcctgggtggtcccccaaaaggtcccttcatccaaagatgctctattctgagagatgtctttttctagtagactcagattctggaagatgcttcttccctgggagagaattgacttgaagagatctgtgtaggaggagaggccacctgtaaagaagacagccaaatgctgagnnnnnnnnnnnnnnnnnnnnctcccctcccctcccctctcctatcctctccttttctttttttcctccctgagacacacttttagcgcaggttggcctatgagccagcacgcagctcaagctagattcaaactggcttcagtactctgcttcagtactgtcacttttcttgatccttaaaaaaagatgtgcttaggcaccaccatttccgggaaagttacaaggctagagtacagagcagagctttggcagtaggcgagaatgagagatcaaatgaaatccatacgtcaaaatccaaagtactgttcagatttaagggcagtttctgtaatctagaggctgacctgggagaaccctttatttccctactagaacctgataggcaaattccgggagtctggcgacggtcactccacatttattgtatgctttgtctttagagtgggaagaagaaaatcaaagaattgctaacttttctcatccccgcggtccgcaaactggaaggctagggaccggtggtggcatctgcgctctctctcctatccccgccccctttcgcctggcgcggccaagatgccgcggcgccaaagggcgctcgcgggcccgggccccgcgctcacagctcccgggggaagccaggttgccaggttggttaacgcctccgcccgcgcgcagattgtcccgggctgaaggcgccacctctggcgctcaggcgcgagccgcccctcccgcacagcccttgtcctccaggccctccctctctgccccttccacgcgccgtcgcccgcctcaggcaccgacaggtgccgcggcactgggtgtgggtcttcatcccaggatgcaagcgtgcgagggcagcgcagccggacgccgggccttcgacagcatctgccccaacaggatgctggacctgtcgcggcggaccctcggcaagcccgggaagccggagaggaaggtggggatcctcccgctgtggtcctggctctgggagagtctgccagccccgcgctccgaacgctgaccatgtgcatcccccgtttctgtgcctggccagttcgttccttcgtggaagtccttttcgggatgcggtggcggcagcccggtggcggtgtacgaggaccctccggacgcagagcccgccccactgccaggtgagccccgaggcacctgcacaacccgattatccatgccgggtgggtgacgcgcacacggtccgcagccccttctccccctggttccgaggtcctcactgagggtcctggcggcgacctggccgaggcttagggttcgctgggtgcctgtctcccgatctcccccgcgcagctctcacaaccatagacctgcaggacctcgccgactgcacctcgctgctcggaaccgaagcgtctcctagtggtgattcgtccgcgtcgcaggtactctttcccttgagcggatcacagccaactatcgacccaaccacccaaccagaaaactgatgggtttatttcctcaaaggtctcaagatggactgggagcacaggtgcattgagcagagtgcagcaagccaaacctcctagaccccaattttcccctcccttgtagtatgtgcttaagttctcgtttccagagccggtctggctgacatttactgcagggccccttgtcattcatatgaacaaggcaatttggagctggtgggccgaggagctgtgaatagaataactgtcttgtttgtcacccacttccaggccctcgggaaccatttgtatttcatgggtactaaagaagtatggaagtcactgggggaaacggacaaaggactctgtaaacaagctagtggaaaacggtccatcttcagagatggacgttgggcatctggctgcttaaaaaatcttattctgctcgccgcaaaattctagtttcttgccgtcttgaggaagagagactccccctccccttccttctaaatatgtcatcttaactcatccaatttccacatcttgccatcgctgacacatcccagtcagaggcacctctcagctctggtgccttagaagccaagggcttgatgcttctttggtgggacatgaagtgtccagaaggacaggtagtcttatccaggtgaaggataaatccacaggaagaggtacttccagttttctaacaacaagtgctgggaccattaagcccactggaacaggccccttacagaagaactctgctgaatttgtgagcaccgcgaggtattagttgagtaacatttctaaggactccactcccaggcttttacaaccttggggagaactcagagtgattccaaacagggggtgtccaggagtagactcttaaggtaagtggtgggagtggctacccagaatcctcaatgtccagcaagtgcggaggtcatctggcctcatactttcaggagggaatacggtactttgaaagtagggccaggggctggtgagatggctcagtgggtaagagcacctgactgctcttccgaaggtccggagttcaaatcccagcaaccacatggtggctcacaaccatccgtaacaagatctgactccctcttctggagtgtcaagtgaagacatgctatcagtgtacttacatgtaataaataaattaaaaaaaaaaaaagaaagtagggccagatagggttagaatcagggtaagtttcacttcccccaaacatatgactagtaaaggagagctctggggagaacaaaatgattaatacaaagataagaatcattaatagaatcagtaaacgtttctgctgggtgtctgggatagatcccctcacaccacggtcctagagattcccctcccactttctgacacttccaaggaagccagggaaccctataaagacagacagtgagggagccaggagagaggaacggatcagacattggctcaccaggtgttgagtaatttatcttctacaggcttctgattacctctcaatagtaggggaagcattctgtgggccctgcctgcttcccacactggtgggaatattaattgagaggttacattaaaaagaaaatgtcatcaagttgaaatgtccatctcttaagagaaactggaaagtgcctagaccccaccatccatccatctatctatctatctatctatctatctatctatctatctatcaccagtttcttcactcaggaacctgggaactctggccaggcaatatggaatgggtgccctaccataggagaaaagccacctccaatttttaaagaccgtgaaaacaaaacacaaaaacaaaccagacaccatagctgctgcagccctgtgagcagatgtcttttcagagtatccctggcccctttactggcagctcacccttcccttccctttatgggtgaagtggttagcactttaagcccctagcctttggaagcctttgtgcctgacctggtattaatatcatcctctctgccattcgagaggtaaggatgtgggggtggtttaagatggagtggcagttctgtaggtgcacagaacatcaagaggagtcagtgatgactcatttatggggaagcttcgatcagctgtccaaaccccagctgcattggcacagctagaagatggactgctgcacctgtggtatgtgagatttgcagaagcagaactcactgccggcccaaggcaagcctaccgttctatgggtcagacgaaacttgagttttctggctgtgagccagagtgtgtgcagactagcattacaacctctggggatgtctgtctgtccagaattgctctctgaagcccagattcagagtcgactgactcacacccttggtttgttttagaacccctccttgcaaactgaagaagacttcaacctgcagaatttcagagatgcaatggatgacctcattgcaggcaagtgcagtcccctttgcagttaaatgatggatgggatgacaccagggagttagaatcataattgagaatatcctctcccttcaatgggaaaaatcacatggcttggtctttagtgcttctatggatttcccagtgtgggttctgggaataaagaccctactgtgatggtgggacagacgttaagtaaaaagggtctacaaaggagcaaaactgtatgctttccatgttccagcaggtttgcctgatttgcttcaggttagctcagcaggtgtatagagcttttggagcctatgaacaaaatagcaagaatctggggaccatggactttgtcttataaagaaagctcatactaaacccaactgtctgggtggctgttgtccccgtggcactgtgccaactgggcacgatgatctgggggcagccagtccaactctcgctttctcctagattcatcctctttgatgtcgcctcccctgaccaacagtgactttcccttttccccttgtgatgtttcgtctttcgggtcctgcctctccccatcgctggacccacctgccttggggtctccagacctgccgccaccaccaacggagcagtactggaaggaggtggctgaccagaaccagagggcactggggactgctctcatagagaataaccaagtagggatgctgctggctgggaattttggaatagagccagggtctggtgtagagcacaagttgggaggtgtaatggctgggatgtgcttctgtggacccagtggttttcatagctggtattgctccctggcccaacctggttttgaacttgctaaactgagatgatagagtcccacctcttttttttgtctctctttcattttcttttcttttcaagataaggtctcatgtagcccaggctggcctctaactccctatcttagagagggtgaccttgaacttctgagatatgcatcaccatttctggtttctgtggtactggagatctaaaacagggcttcatgcacaagtactctatcaactgggctgcattccccacgcctgtctattcctgcacctaaccgtgtatcacacacaggcttgcctagaatttcgatcctcctgcctcagtttcccctagtgctgagtggtgtgcaccactgctctcgagtcccaccgattggtaatactactaactatatttatggacaggtttttatgtgtctgaccctgtgtttattaatttactttcttctcttggttgatacaacacaagctagacaatctagccccgttttatagatacagaaatggagacataggatggttgactttcagagggcctgctgaccaaatcagtactcgtgactactacccaacaacacactaaagtataattgagatacagtttattgaagtacttccttttaaaaaaaaaaaaaagtcaaataattggctactgtcaggcaataaaaacccgtgggtcttctgtcctgataagacccgatgagttagggtctgagttagttcctgaagagcagacccagcactgtggcttctgcttgatgctggatctcctgcagctgcacgtgacgctgacgcagaagcaggaggagatagcctcgctccgggagaggaacgtgcagctgaaagaactcgccagccggacccggcacctggcctcagtgctggacgtaagtggaccggcgcgcgggacacggtcggaactgtgacagtgagcttgtgttggggcccctgggtgtccctcgagtagcgcgcacctgactcttttttttccagcgcggctccaggcgagtccccctggctccagggctctccctcatctttcacagaagctgatgatcacgcagtctcctgccgagcccttccagatcaaggcaacaacgaaaaggagcctggaggagctgttctgtgctgcggggcaagcagggcagggttgcgcggaagtggacgccatcctcagagacatctcccagcgctgcgaggaagccctgcacaatcgtgaccctaagcggcccaggctgcagccagagccagacagcaaggactgcagctccaggaacctccacggcgccttccgaggactgcgcaccgactgcagcgccagctcggtgaatctgagtcacagtgagctggaggaaggcggctccttcagcacgcccatccgcagccacagtaccatccgcaccctggctttcccccagggcaaagccttcaccatccggacagtcaccggtggttacaaattccgctgggtccccagctgatctgggatgtggcttcccctaaaatactgccctgtgtaacagcagagagaagcgtctgcaagcaagtgggcatagctagaaatgtttcccacatctggttcccagaattctctgcaagcaaacgctactcggaaactttattatatatttttttttttttttcagaaacagaagtgtcttggtacctgtgcaatgaaaagttctgctccgaagccccatatactgcttgcttttgcacggtgaaattgcgtgtatacacacgcacacctgcggctaagcacacgccacagtcaaacttagatgtatttattttttagcgctttgtttgtttgaggcaggtccaggaggcacatagagcagctggacacagacttgctattatgattgcttctgtttccttctgcttccatctcctgagtgctgggttagaggtgctcaccgccatatttgactgttttagcctttttgtaagaagagagaacagtgcaaaggaatgatggggggttccactagagaggaattatccaatcacagccatttaaaggcttgggattcagaaccccggtatctgggtgttttggcacatcacccaattcccctctgtcctcagagtacacctacctcctagctgtgttaactactggaaaatgctatttcagttggaaaaaacaaaaacaaacaaaaaaccaccaccaccaaaactccggaaacaacttggcagttgtggagcaagctcacacaaggatgcagtggtcatcccagcacttgggaggcagaggcaggcggatctctgagttccaggccagcctggtctacagagtgagttccaggacagccaaagctatgcagagaaaccctgtcttaaatagcaaagaaacaaaaccaagcaaagctacacaattaggcaaatgctgatgcaggataggtgctaaacacagttgtttgaaataatcatcctatgattttgtaagagttggtttgcgtgcttgctgcttttggagagggcttggacttcagaacccagccagcatccatatcaatggctcaaatgggaaagaaactccagtcctggggtgggggtgtggttatctgacatcatcctcttctggtttctgtgggcatctgtatactccggagctacacacacacacacacacacacacacacacacgcacaggcacagtcacataagtaaaattctttacaaaaggatttatggtaatgtctcaatgtattcagctttatcagtgcaaacagaaccacctccaaaccaacttagttaagaagaaaggctggttgttttaagcaagtggtctgtactccgcaaactgggggcccctcaccatatttcacattacatgactagttcttgtaagcaaaatgtagtgaccttccctcaatttttctctccctattgtttgtggttctcttcccaccccacactctgttctgaaatcacacaaatggaggacgtcctgtgcgatttctctcaacctccacatgctcgttctgagggttcttcctgctcctggggctgggctgggcaggcctccagatgtactgcaccacagtgcatagctggctcttcaggctgagtgcacagatc

SEQ ID NO: 1709 - DNA, 1781 bp, Mus musculus
atggttaccccttgccctgccagcccgggcagccccgccgcgggagccgggaggcgagacagccaccagaacctccgcgccccagtgaagaagagcagacgcccgtgcctccggagaaagaagccgctgcggccgctgaacgcgtgttcgctcccgggagactcgggcgtctgtgaccttttcgagtcccccagctccagctcggacggcgccgacagccccgcagtgtctgcggcgcgggactgcagctccctactcaaccctgcccagcccttgacagcgctggatctccagaccttccgagaatacggccagagctgctacgacttccgaaaggcgcaggagaatcttttccacccgcgggagtcgctggcgcgccagccacaagtgactgccgaatcgcgctgtaaactgctcagctggctcctgcaagtccaccgccagttcggcctctctttcgagtcgctgtgtctgaccgtgaatactctggaccgttttctcctcacgacccctgttgctgcagactgcttccagctgctcggggtcacctgtctgctcatcgcttgcaagcaggtagaggtgcacccacctcgcttgaaacagctcctggccctgtgcggcggtgcgttctcccggcagcagctgtgcaacctggagtgcatcgtgctgcataagctccacttcagcctgggcgcgcccaccatcaacttcttcctggagcacttcactcagtggcgcatggaagccggccaggctgaggtcaccgaagctctagaggctcaaaccctggcccggggagtggcggagctgagcctaacggattacgcgttcactacctacacgccgtccctgatggctatctgctgcctggcgctggctgacggattgctgcagcaccagcacgagatggacctgcgcctgggagagcacccagaggccacactgcaagactgtctgggcaagctgcagacgctagtgtccatcaatagcagctccctgcctcgcattctgcctccccagatctgggagaggtgcagcctgccccagagttggcaataaaaagcacccccttgagctcctttttaaaattccctggtccctgctccgtgccttaaggagaatatgcagtacagatccaaagagaagttgaggtctcctacctgtaaatactgtacaataacggattctttatttattttgtagtacacaagggcaggggtgacagttctggcttgtctaaatgctgctgttggcatgcctgactgtctgcttttcccaggcgaagtccatcacgaggtagccaattccggaggctcttccctgctcccacagttttactttgtagttagctctgtgaaaacaacctggcaagattttatatgccactgttccagaaagcagacaagtcaaggtggcttgtccgtatcttaaccccctccagtcaggaggctgagttccctcccccatgccagtggcccaaggagaatgagacagggttagaagtcagagtggtctgtgctgtccggaaaggcagtggctgcactaactgatgtggagctgggaagctttggggaccgggcagccatactagcagtgggtgaagcaagagacagtccctggtgcaacacaggaaatgctggaatgccttttgcgtattgttatagctgttgcaacctgggtcatttcctctgcagctacactcatggttcagtttatactgcagcatgagcccagggtaattctggtacggcagtaataaatattatactatttgcaacata

SEQ ID NO: 1710 - protein, 346 aa, Mus musculus
MVTPCPDGSPAAGAGRRDSHQNLRAPVKKSRRPCLRRKKPLRPLNACSLPGDSGVCDLFESPSSSSDGADSPAVSAARDCSSLLNPAQPLTALDLQTFREYGQSCYDFRKAQENLFHPRESLARQPQVTAESRCKLLSWLLQVHRQFGLSFESLCLTVNTLDRFLLTTPVAADCFQLLGVTCLLIACKQVEVHPPRLKQLLALCGGAFSRQQLCNLECIVLHKLHFSLGAPTINFFLEHFTQWRMEAGQAEVTEALEAQTLRVAELSLTDYAFTTYTPSLMAICCLADGLLQHQHEMDLRLGEHPEATLQDCLGKLQTLVSINSSSLPRILPPQIWERCSLPQSWQ

SEQ ID NO: 1711 - DNA, 22597 bp, Homo sapiens
caacctccacctcccgggttcaagcgattctcctgcctcagcctcccaagtagctgagactacaggtatgcgccaccacacccagctaatttttgtatttttagtagagacagggtttcaccgtgttagccaggatggtctcaatctcttgaccttgtgatctgcccaccttgacctcccaaagtgctggaattacaggcctgagccacagtgcccagctaaatcttttttttttttaacagtctcttggttttgtgtcatacttccctattctgagaatatcacaaaatctgcagcttatcactttcaaactcaccattgacaatgaagagcaaatctcctggataccccaataccagggtagggtatggggatgcaggggagtggcaaatccaagaaagagatttccttcctgcaaattaccaacatctttccctttattctggctccttttctagaaagctcactttttctccaagcaaatgacaccaagaatgacctcattcttcagatgagattctgctccctatatcctggtgtatggtataatgaagctacataatacccaaaacaagtttgatagtgtaacaaaatcttgaccatatcataagtaaattgcaacacactaaatgttacacacacagtatcaggaaggttccttgctcctcacagtcctgagtctacatgggcaacaccaccatctaaagggaatccagcagagtaagcatcaggctaccatcacagtttgacgaaatgcttgcaaggcccactgaaacaagtcacttagtatcccacaccataacagagttgaggcctgggctggcttcaagcataattatgctgcagtgcttactaccttttagttcttgatgtgctcttctgatccagaccctggaaggacagaggttgctgctggagacctttccacccagcatctgaatatggcaaagagacttaacctttacagaagtaaaatttcttgggccaggcacagtggctcatgcctgtaatcccagaactttgggaggctgaggtgggtggatgacttgagcccaggagttcaagaccagcctgggcaacatggcaagaccccgtctataaaaaaaaaacaaactaaaattagccaggcatggtggcatgtgcctgtagtccccagaggcaggaggattgcttgagcccagttggggggagcaggtgaggaggctgcagtgagccctgatggtgccactctagcctggtgagaccctgtctcaaaaaaaaaaaaaaaaagaagtaaaacttaaatgttacaccaggtgatgtttatttggagagctagacctttagttcagtactcaaagaccagcttcagatctcaaagtccagtggaactataatatgaatagtagcctctttgcaactataataaatacacatactccctacaagaaaccaaaaaacaggtattagttttccaaccaccctggatgacaaagacacatataccttataccttagctagaaaaaaaaccataattatagcagcaactgatattgaaaactacatgaacgtattatatgtcttcattaatccttataacaatcttataggatacccttactatcccaattttttaaacactagagcaacagaaataaaaaggttgaataacttgcccacgttcacagagctagtatactgcagacaggattgaactccagaagtcaaactccagagccaaagctcttaaccactgcacagtactgcctgtgccgggcagattgccacagataggagggaatctgaggagagttgggagaaaaagcacatctatgcatgaggagagaagcagtgcacttgagcatgtgtgctgaacttttagtgaactggggattggcaaaactccaggaaggcaggtaacaaagagatagcctttttcccaggtggacatttagacatgtaagtcaaacgtccgggtttttaaaatgtgctaaaaatgcctgccctttgtgtactaaataccagcaaaacttgtctgacttcaagttatatgtctcaattttgatgcttaaatacattaatagaaaatagagtcttaagtaaatattagaatttttagtgacatcaaaactgagtttaaacattattttaaggtgctagcaaacgttcacatttagatggcaacctactttgtttgctaaaacaaggcactgtcagtaaatgcattgttcctacttcagcccccatcatagagctggaacacggtgagagtgggggcttttgtctcaaactgaagtgccaaactggaattaaaaaaaaccctctggttccatcatgttaatactgccttgcagatttcataaaccatacctgaaaacaaacaggtcaaatcgtggttaagcagcttttgatgtagaagcctgagtttaatttggttttacatttttaaagtattttaggtttacctagtgcatttaaggagcactgggcccaggtcccagagagattagtaaacagaaattaattttaaagacttttcatggggaaaataaaatgcttttaacttggaccatattgttcataccaactacaaatactgaggagaggaaaacgtggcactgatatctctgacagtcttgctttaaaatctctagaaggtggagcacaggaccaagagatgtgcaggaatatcacttcattatatgtcctgtctaaaactacattgaattgggtttcaacagtgcattctacaaagaggcagtggaacatgagaaaaacactgtggtgagatggagggagacataaaattcgttgtttaatgtcaattatggtatttacccttattcattgctaacacccaaattcacatctctatcccagacttcacacctgaactctcaatttgtgtattcaaatacctgttttacctccccatgtggatgcctggaagatgtctcaagcataacagactcaaactccttatcttctccataaaaccttttccttccctcaatcctttccatctcagctaatgacaacttcatatcttcaattattcatgtcagaaaatctgggatcatccttgactctttctctcataccctgtatctttctttttgggacagggtctcggtctgttacccaggctggagtgcagtagcttgatcatagctcactgcagcctcaacctcctaggctcaaggaatcctcccacctcagcctcccaagcaactgggattacaggcaccagctaccacgctcagctaattttgtgatttttggattttttgtagaggcagtgtctcgcaggcaggtcttgaactcttggcctcaagcagccctcccaccttggcctcccaaagtgctgggataacagatgtgagccactgtgcccagcccctatatctttataccaaattctgttggcctatattcaaaatatatccagaatctaatcacttctcaccatctctactacctactatcctggttcaaggccccatcatctctcacctgaattattttaatagtttcttaagtttcaatttaagtgttttctgttttcagtttaagtgttttctgtttctgcctgcgtccttctcctgccacccacatgtattctcagcctgattaattcttctatttttcttttttttgtttttgtttttgtttttggagacagagtctcgctctgttgcccaggctggagtgcagtggcatgatctcggctcactgcaacctccacctcccgagttcaagtaattctctgcctcagcctcccgagtagctgggattacaggcacccgccaccacgcccagctaatttttgtatttttagtagagacaggtttcaccattttggccaggctggtcttgaactcctgacctcatgatctgcccgccttggcctcccaaagtgctgggattacaggcgtgggacaccgcgcccggcccaattcttctaaaatagtgttgtacaacagaaatacaatgtgagccacatatgtaatttttttaattttttgagacagggtctcaccctgtcacccaggctggagtgcagtggcatgatcatataactcactataaccttaaactcctgggttcaagtgatcctcccacttcagcctcccaagtagctaggactacagacatgagccaccatgcctcatttttttctaattttttagtagagatgggatcttactatgttgcccaggctgttcgtatgtaaatttaaaatttccagaaatcgctttttgtttttttaagaaagagtcttgttctgtcccccaggctggagtacagtggcacaatctcagctcagtgcaaacttcgcctcctgggtacaagtgattctcatgcctcagctcccctagctggggttacaagcatacaccaccacgcctggctaatttttatatttttagtagagatggggtttcatcatgttggccaggctggtctcaaactcctgtcctcaagggatccgcccacctcagcctcccaaaatgctgggattacaggcatgagccactgtcccaggcccagaaatcacattttaaaaactgaaaagaaatagatgaagttaattgtaataatatatttaatttataaaatctagacacctcttgtcagaatctctgtctgcatctcccactcttctgcccccttactctgctctaggcacactcctgtttcagggcctttgcacatgctcttccctttgcctggaatgccctttccccagaataagcatgattcactctctcaactccttcaggtctttgctcaaatgtcaactgctcagtgaggcttttcctgacctccctatttaaaattcctataaccccacgccctaaagttcccattcccctttcctgctttattttcttagctcttttttaccatctaacataaacatacatttatttgactattatgtctcctcccactaaaacataaagtttattagggaaggaattttggtctattttattcactgtggtattcccagcacctagaaaagtgcctaatacatagcaggaactcaaaaaatatttgatgaataaattaacaaatgactaaaagtaaacactgcttttaacaatgagcacaagctataacatcagaaggcagaggaaagaggtaaggatgtcatgatgaccatttaatgaagacatggctgagattccttcctttcctactctatctatagaggagaaacgaccaaggggaaataaactatgccttttcttggaagcagtggacaggagtcctagatataaaacctagccctgagctttgaaggtaaatttaagaaggcttttatatccaagttaaatcaattaaaataggttttatccaatattaagagttagaaaaaaatgtaaaaaccatcccctgaattaaaagactgcctacaactgagatgctatactaagaaaagctcctttcaaggtttgttttgctaaattccatgatgcacagtggagccatatacaagtttatattgaatattttcattaatcagtcaaaatcttggggatattgttttaactaagcaacatttgagaacaaaaggtaaccactggtatttacatatgttcattcattatttaaataatgtcttttggtacttgcatcctgattaagctccatctttacattgaagacttaattgaatggaaacatggaactttctttttgaccttaaacagactgacaggtttcattgttttaactgccaacccacttgcctaagtacataagccagactcacagacctccttgaattcacctaaccttcaacatggagccccctttgtaatctatttcctaaatctttagaatctaatatcctatctccatcctcattacccacaattgtctcttgcctgaattactgcacctaactgggcttcgacctttgcttctccaatctcttttccacatatcagctagagtaatttgatatttttttttttttttttttttttttttttaggcaagatttggctgtgttgcctaggctggagtacagtgatatgatcttggctcactgcaacctctgcctcccgggctcaagtcaccatcccacttcagcctcccaaatagctggaactagaggcacatgccaccattcccagcgaatttttgtatttttgtagagacagggtttcaccttgtcgcccaggctggtctcaaactcatgagcacaagcaatccgcctgcctcagcctcccaaagtgctgggattataggtgtgagccaggacacccagccttaaagtaattttttaaataaaagacttgctttgggaagtcgtagttaactacgacttgctttgggaagcctttccaggccaggctaattgctcctactatgggtttctgtgacatcagggctgccagatgtcaggatgcccagttaaatttcaatgtcagataaacaacacatcatcttttagtataatatgttccctgctattatatactaactaatgaatagttttttcttataaatatgtcccatgcaatatttgggacatactcaatgctcaacatttttttatttgacattcgaattaaccctgtgtcctgtattttatctatcaaccctaaatccagtaaatcctctatcagtaatcctttaccacgcagtaatcatttaaacaagtgcaacaagtggttctttgttcccccaactactatgcagctctgtgagggcagggccgtgcagtcttacagttttagacccagcacctggcacagcaggcattccagaagactgaggaatacgtccatcaagccaaagctcaagtaccacctgttgggaattgactctaactataggcaaacttcctgggagtgcaaagcattttcagcgtggtgcaaagacagtctcacgtccacagacggatcaaatgatggtgcttttttttcagaatagctccagtgtggccgggcgcggtggctcacgcctgtaatcgcagcattttgggagaccgagtcgggcagatcacctgaggtcaggagtttaagaccagcctggccaacatggtgagaccctgtcgctacaaaaatacaaaatttagccagggatgatggcaggtgcctgtaatcccagctactcaggagcctgaggcaggaggatcgcttgaacctgggaggcggaggttgcagtgaccccagatcatgccactgcactccagcctgggggacagggcaacactccgtctcaaacaaacaaaaagaatagctccagtgtgataatactgttgactccccaatgacagctttaaggtgacccgactattttacgttcaaaaaggacattgaattttcacatctattttacttgaccctcaaggcaaataataatatccatatttaacagatgaggaaatggagactcagagtgggaaatgtcttgcctaagataaccaataagagagccacagttttgccctcaggagttgacttcactaattagattttcaaaaaaaagaaaaaataggctaggcatggtggctcacgcctgtaattccagtacttctggaggctgaggcaggtggatcacgaggtcaagagatcaagaccatcctggccaacatggtgaaacctggtctctactaaaaatacaaaaattagccgagtgtggtggtgcgcacctgtagtcccagctactcaggaggctgaggcagaagaatcacttgaactcgggaggcggaggttgcagtgagcccagatctcaccactgcactccagcctggcaacagagtgagactccgtcttaaaaaaagaaaaaaatagatggctgggaacggtggctcacgcctgtaatcccagcactttgggaggccaaggcgggaggatcacctgaggttgggagttcaagaccagcctaatatggagaaacccccgtctctactaaaaatacaaaattagccaggcgcggtggcgcatgcctgtaatcccagctactagagaggctgaggcaggagaatcgcttgaacccaggaagcagaggttgcggtgagctgagatcatgccattgcactccagcctgggaaacaagagcaaaactctgtctcaaaaagaaaaaaaaaatagatgaaagcataattagattttaaaaagaaaaaaaaggaaaaaggagttgacttcctgctcttttcactttaccacactggccacctgggccaatatgaaaaaatcagaattcctggattctttcttctcacccagaaagcttctctaggaagaagtctggtatctgagtcctctccacaggttcaattgctcctcccataatgttgctcctcccaacaatagtctgagagacagtaaggcctggcaccactcccagtgtttcttagctcgtctcccatgttagagatgagattatttatttatttttcttttgagacggagtgttgctgtgttgcccaggctggagtgcagtggcatgatcttggctcactataacctccccctcccaggttcaggcgattctcgattctcgtgcctcagcctcccaagtagctgggattacaggtgtgtgctatcacccccagctaatttttgtatttttagtagagatggggtttcaccatgttggccaggctggtctcaaactcctgacctcatgtgatccacctgccctggccttccaaagtgctgggattacagtcgtgagccaccacgcccggcccaaatgacattatttagggcagaatagagagcttgctcagagttatggggaaataggaggaacagtggtcagaacccaaaatccattccttttctttcacctgcatctctaggagacaccatcccaccatctactaaattttcatagacagaaacttgtactttgagcagacacatttatcagctttcttctggaatgaggttaggtggctgaacctgctcttggtttggcacccagtagcctcgcctctggaaaacaccagggttgagggtacctgagctttctgccgttgctaagtgcctgtgaggttgattatgggctacttgtgctcctgcagccccttctcctatagggtcagagaccctcaggaagattcactaaggccacagaagggctccagcttctaccaggacgggagtctgtggactaaacccgaggcgccttgaggaaactgccacgcccagtcggcctgggcgtccccattccagctttaatttccctgagtttatcaccctgaaggagcggacgcaggaagcagggaaaaaccaaggactgggctgccggcggggcagaaggccagaagctaatgacctaaaacggaacaggctgtgagcaattcgatcaaactcgaaatgcaactttccaacaatgttcttaaaccgctgtagccccagcttgcttggcttggggtgaaaagtgtgggagaaagtcttcacggcctgcagacttgcttgccgactgaggttgatccggcagttttccgttttgttttgagcgcgaaagcgtggctggctggtggagctccaatctattccgcagcacaaacggcccttctgaggctctgctccccgaggctggcggaaggaagggcactggctactccggtacccaccgaaacaaaaccgacaaacgcaaccgaattaacactattgcttgtttgggtcactgaagaaaacttttcccgtgtcgacagaattctagcccgactttcgtttggaactcaggatcagacctttacaaaattaccgacctgggttagaggtgcccgcacgtgtcgagaccatctggccaaggacagagagatgccccctgggagaatgttttaaccggcgcagcggagccgcttggctgcgcccgccgcagccctactcccactccgtgcaccgggctccgcagtgacccgggctcccgcagcgacccgggctccggttgcccaggtaacgcaggacgcaggcgcgaaaggcgggtgccgggcgcgcgctgcagctccccctccctccggcgggccgcggaggcgacgcgctgcctgcgccctgaggcgagtggttctccagccggaaaatcgcggctccggtgccgctctgggctcagccagtgagaggccgggggtgtggtagagagaaggagccggccgggtacttagcaccgcgccagcctctgagcccggcctccttcgcactttcgagtgcgcgtttgctgcccgccgcagcccgggcgttgaaggtagtaaagcggccacccggccgcatcatggtgaccccctgtcccaccagcccctcgagccccgccgcccgagcggggaggcgggacaacgaccagaaccttcgcgccccggtgaagaagagcaggcgtccgcgcctccggaggaagcagccgctgcatcccctgaacccgtgcccgctcccgggagactccggcatttgcgacctgttcgagtcccccagctccggctcagacggcgcagagagcccctctgcggcgcggggtggtagccccctgcccggcccggcccagcccgtggcgcagctagatctacagaccttccgcgactacggccagagctgctacgccttccgcaaggcgcaggagagccacttccacccgcgggaggcgctggcacggcagccacaagtgaggtgctggtagagccagctccacgccgccgctcttcctctcctcccaggctctctcctctcctgccggctcggccctccgagcgcccgggcccgcgacagcccaggtcccgccccgagtcgaagcacaaggggccgtggaggggcgtcaccggcctcattttacagatggagaaaagtggggcgtagacggcttgagggacttgccccgtcccaagctggctactggggcacggtagagaggaattcgtttccgggttgagtctggactcctaccgaactcgggcaagttatttaacacccctgagcttctttcttcatctgcaaaatggaacccctccccttcctttgaattgctgagcccattacgcgaggtaacgtgtacgacgctctctgcacagcgccaggtcccaatcccggtgttccggctcagcacggcccacgcgtttcccagtttccattgcgtttctctttctgaaatcttcttgcccctctcctgggaagctccccgattcttcttggcccttccttcccttccacagtccctctccaccctaagcccagcgggcccgcctcccccctccttcccggcaggtgacggcggaatcccgctgtaagctgctcagctggctgatcccggtgcaccgccaattcggcctctccttcgagtcgctgtgcctgacggtgaacactctggaccgcttcctcaccaccacgccggtggctgcagactgcttccagctgcttggggtcacctccttgctcatcgcttgcaaacaggtacctggggtatcaaacaggtacacgcggcatctggggacgcagccaaactcccccgccactccctggccgcccgtctttccagcgcgcacgattcagtgctgggttcccagaactcattttatcagacatttgcatacgcatatatcccttagccttaacttcacaatttctccacaaacgaaaaatcctgtcactcggcttccaaagaaatagcctaatagactaatagctgtaatcagtcccaaatagctcttttggcacctctagtctagcctccgaaaaagccttcaaaatttcccaagctttttttttttagttggacagtagttagatcaactgcgctggaagtacgctctaggtcacttacgtggaagcagtggagaggcagagccccggctgtctctctggaagggatggggaaagtccgggcgtcatactggggtgggcctggggcccgggaagccgcaaagcggggttgagtgcgccctgtgttgcaggtggaggtgcacccgccgcgcgtgaagcagcttctggccctctgctgcggcgccttctcccggcagcagctctgcaacctcgagtgcatcgtgctgcacaagctgcacttcaccctgggtgcgcccaccattagcttcttcctggagcatttcacgcacgctcgcgtggaggcggggcaggctgaggcctccgaagctctggaagcgcaagccctggcgcggggggtggcagagctgagtctggccgactatgccttcaccagctactccccttccctcctggcgatctgctgcctggcgctggcggaccgcatgctgcgggtctcgcggcccgtggacttgcgactgggagaccacccggaggcggcgctggaggactgtatgggcaagttgcagctgctggtggccataaacagtacttccttgactcacatgctgcccgttcagatctgcgagaagtgcagcctgcccccgagctcgaaataaaacagatccttcgtttccttttagtccctggcccggctgctggacctctcccgtagcctcagaagagtgcagtactggtccacagagaaggcttcaggacctgcttggtcagctgcaggttgtaaatagtgtacgatactagcatctggtattttatttattttgcagcgagcacatgaggaagctgagtctttcaccaataaacagttgtggtttgtctaaatcctgcaagtgtctgtctgcggggagggaaggtgaattcagctcaggaatggtggttggcaacgtttgcgggattttcccttccctctgggtccactctgtaattgggatctctgtggaaacaccaggtcaggtgaggtcctggatactgaattccagagattagtggagtcaggcttacctgatggcttgggtcctgtgaccctcgaatagaacctctatgctgtccagagggttgcacttgctggtgaggcagatgtggggctgggaagctttggggaccacacaggcacacaagcagaagtgggggaaagccatatccaggcatgagaaatcccgtgttcaaatggagcatgttggaaaccaaggatttgactgtggtcacagccattgcaggttgagcccatttaccctgcaatcacgtggtccaactgttcatgctacgacatgtgagcccaaagtaactggcataatagtcataatggctatattgagcattaagtatgtcctaagtactgtgttcagcatttatttcattcttccagcaactctatggagcagagtctattatcccatttttcagaggaggatgctggagcacagaaccattaaacaacagtggagtagccgggatctgagtctagagtcccactcttagccacactgctaaatgtcccccacttacaggtttctggtaattctcaaaacaccctcttcctgagataggtggcagttatttactcagtgctccccattcagtagggactatagagaacacatctggagagccagcgcagtctgtacctcagtcacgttacaggaatcgttttacagatgagaaaaccaaattgagaaatgagacagaggcttgccggagttttgactccgcctgtcatattgtcttcagtctcactgttacgaatctgatgcaggcactgaatctctcagctctgtcacctctagcaaatttcatatcctctctgagctctacaattgatatcaaggttgttgtcagtctaaatgagattgaaaagcttaaatgagattaagtttacgtgttataaggtagtatagtgattcagtaagtgggttctgtatccaatttgccaggtgaccttaagcaagtcacatatctatgcctacgtttcatctataaaatgggaatatcggccgggcgcggtggctcacgcctgtaatcccagcactttgggaggccaaggcgggcggatcacgaggtcaagagatcgagaccatcctggctaacacggtgaaaccccatctctactaaaaatacaaaaaattagctgggcatagtggcaggtgcctgtagtcccagctactcgggaggctgaggcaggagaatggcgtgaacccgggaggcggagcttgcagtgagctgaaattgcaacactgcactccagcctgggcgacagagtgagactccgtctcaaaataaaaaaataaaaataaaaatgggaatatcaatagggcctatttagtagggtggaagtatagctctaatgagatggtccatactggtcccccagcacataggaagccctcaagaaataaaggctagtggtaacctgcacagtgatgggaggacaggggctatgcagaaaaacttggagcaaagaaacgagagcaaatatgggaaaataacaatttgtgtggggttgaacatatggttgttcatcgtactgttttttcaaattttctgtatggttgaaaaaagtgataattttttgggggaaaatctgtcatgttcccctgcacctagggtatatcaaaatgtatgacaaatacaaataaaaagcaaactcaaatttagagaaacttctttgcacttctctcaaagtgtgtcttccaggtgttctcggagccaggagtgccttactctgggccccttgaatgcctcttctgacatattgctatgctaaactttctaggaactttctcctccttggctgtggaagaaggacgtggtgatccccaagctatttgtgtaaaagctgctctgtgatggtgaaaagggaggaggaagatcatatcacctgtttcaaataacaaattattagggccctctgcttggttgtaaggggttggggtctggtccccaggcaaaagagtgactttgcgcggagttgtcttcaccaatatctgctccattaatcagccaagactgctatgagttactggttccagaatcatccacactaggagtcatataatcatgctattccagttcctgttacaacagataatgtgcaatgcccatatttttgtctactccaacttagaactcattgacgaatatttggaaaatgggcctatcctggaaattttgtgacgatctgcatgtgtggagatcgccccaaaactcagctaagagcttccctactcattttaaaggctggaaagtgggtgaggatggggatggagatggagatggactggctagtggtcgtgctactcagaaaccagaggaaacaggagacagggctaggaacaagttgtgggaagctggaaatacagctgaaaaggcttttaaaaaatcactaatttacccatactaagcaccagtcactttacataaataatctcactcatcttcacagcaactctattgaggccagtgtaactttttttcctaaagacctagggctcatggacctggtcctcaggcactctgaccctaaagccagagctcctcaccatgagccataccacaccaactctagctggctgacctcacatcaattcagtttctgcatctactcctgggtcagagagtctctcactctattccagctctaccattggattaccttccaccgctgttagggtatcttgtttcttactagaggctctttcactacgactactaggtataaggggaaaacaaggtgcccaacataggggggtgggtacacaaagattccaatttcagacgactgttcaaattggatgaatatgagtggtactgagaaaggtccctcgcctaaggatgcccctccctaggagatgcctcggactcaggaaaatgcccattccttggagaggtgttggcttgggaatggcaactacgactgcgaagagaccagccaaacgtggcgatgggccgctgaggccactaggaaagacaggaacagggttttcggggattcggtactttccactgtggcgttttcagaaagtggaggagggttcgtagtgtcactttttcttaacggacggtcttttaaaggctgtgctcacgcgccactgccgagaagagtgcggggcttggggagcggggcgggctcttggcgtcaggccaaaagagaccacgtggaaatccataagtcaggacccaggataaggttcaggtttgagggaaggggcttctgtaataagggggctgttccagggcatccctgccggtattctacatccttactaaatcctgcaggagcgcaaaggccggagtctagcgctggcgggtgtcactccacgtttatttcgtgcgccttgtggctggagtgggaagaaaaggaaataatcgttaactttgccattccccctgtctgtaagcgggaagacggtacccagggcgagggagaccggcgtttgcccgcccctccttctccctctcttcgcctggcgcgtccgggaggcggcggcgccaaagctcgccgaaacggcgctggcgggccggggccccgcgctggcggctcccgggggaagcccggttgccaggttgggtttaacgcctccgcccgcgcgcagattgtcccgggctgaaggcgccacctctggcgctcaggcgcaagccacccctcccgcgcggcggtcctccccctcccccgccatctctcagcacctcctcggcagcccctcggctccttctcggtcacgcgcctgccccaacctctggctggcttcggagcctgcaggcactgaagggagtgcagggtgtggatcgctgccccagcccgggccgccgcctccgagcagtcggcacccggaggcaggaggcacaatgcaggcgtgcgggggcggcgcggccggccgtcgggccttcgacagcatctgccccaacagaatgctggcactgccgggccgggcgctgctctgcaagccggggaagccggagaggaaggtggggcggttgattcgggccgggcggggtctgcgcgctcggtgccccgagggctgacccgcgttcaacgtttgtgtgcccggccagttcgctcctccgcggaagttcttccccggatgcacaggcgggagcccggtgtcggtgtacgaggatcccccggacgccgagcccacagcgctgccaggtgagccccgtggcacccacgctacccctcgggttccccgcgccgggagggtgcggcgcgcacagctcggaggagcttctctcccccgggctctgacgtcctagctgcgagcctggcggagaggctcagggcccgcccggcgcgtgtctcccggtctccccgcgcagccctcaccaccatagacctgcaggacctcgctgactgctcttcgctactcgggtccgacgcgccgcctggtggtgacctggccgcctcgcaggtacctccccttctcgtggagcctcgtggtttcacgcaacccaaaccctcctccggggtggtggttttaattccccaaaagctcctctcgggtcgggagcgcaggcacactcagctggtgaggggaagcattgtgcaggcacctgagcctcccagatcagaacttctacttgcatcctagtatgttatgaagaccacatatccactggagctgatttgaccaacttgatacagtcgggctcatctggaggcctcccctcctatttcccaccctatctactctttggagctgtgacaagattgcgcactgagagaccaggcgggtgggtgggagcaaagttgcgcactgggaacctgttgcattcctatcagttctcccaacacccccttcctggccattttcattccgtgggtatataagaagagtggaggttgatggataacttctctatcaggactggaaaagagcaagagaatttgcagttggaagaagcaggaaggacaaaggactctggaagtaatcttgcagaaaatgttcttctctgcagagacagtccttcagcaattgggcgctttttcaaagtcctgttcagcccttcgaaaagctctagtcacttgccgtgatggggcaaaaaggcacttgacttttttcttttccccaaaacctgtcttcttgctcccatcccacttccgccacttgctggtgctgacgcttcccaggcagagaagggagtctcccagcactggtgtctgggaggccagaagcctggctcatgggtaggacatgaagtgcccagagggacaggaggtcttaaacagatgcaacccccaggaaaagtgccagtttcagcttgctggcaataggtctggggtttgcagacaggcccagtatggaactctacaaagaattgaccacctcccagaactgggagtgctggtggagcaaaactcagccctcctccaagggcctcctagaaccttgggctagagcccagagacactcagtttaggtggctgctgagagcagagattgttaaggcaagagttgggagtgggcactgcactgcagaggacatttaattgttctttttagatctggatgatcaaataaggaaagataatgcctgagtatcttccaactgacccagaggcctaggtcactcccttaccccagcatgtttattgtgcaagtaacaaaacccaagcagctctcattggatgtttgtctaagtatacagattctacatttggcatcatgctctttgttagaatttttttcttgcatttgtagttggagaaatgccagatttatctaattggggaggtagaattcaaagtttcattttgtttattttctttttctttttttgagacaaggtctcactctgtcactcagactggagggcagtgacatgatcatggctcactgcaacctggacctcccaggctcaggcgatcctcccacctcagcctcccaagtagccaggactacaggtgcacacaccacggccagctagtttttggtttgtctgtactttttgtacagatggggattcgccatgtcacccaagctggtcttgaactcctgtgctctagcgatctgtctgcctcagcctcccaaagtgctgagattacaggcatgagccactatgcccagcctcgaagtttcaaggacagagctcacatcagatggaccaaaaaatccaggaattttcctgggaaagacagagctagttcagaggaaagaggcccccaggggagaaacactcagggagacccctgggacactcagatcacatttccccattcctttcctgctgggaaaggtggacagagagaggaagtgctctagaaatgtttgaggttcagaatggaccaacacctggattggcataagaggtagcatttccagggccccagttcctgagttggcctccagtctcctcatgagacttttctcaaatccctacccaggaggagaccttccagttattgaagaatgagccccttcaaccagggcagcactcatgctccaggacttgtctggggccctcagcccttcctttctcatctcctttctcttatagtctcagcatccaactagtggcagaggtgctagaggcctccctgcttgactcttttctcccaagggaaaactgatacttgtacattctttgaagttaggggcagagtaagttcctcttcccagaaatattttaatagtaaagaagggctttggggataacagtatgatgagcgcaaaggaatgaatcaacagtgcattcagtataataaggtctttctggtgggctattggatgcatcttctcttaccatggcccttgagactcctgtccccttcccagtgctgtcttcggtggaagccagctttcctaaaaagagagaaaagctagaggaaatgaagtatggaggcaggaggccctattccactacttcagagctgggtgactgggtaactctctgagcttcagattcttcctcaaagaggaatcagttaggcccctgctgcttcccacactggtatgaggatgaactgagagactgtgtaaaagcgtttttatcaactctaaatgtccatgaattaagggaacaagaaggcctatgcgcctccagccccttagggtctcctttcctctcacacacccagacactctgcaggaggccgggagagtacagttcataatgttggaggtgcaccggctgtacgagaaaagagtactcccaactttttgggaaactgaaagagcaatggaggccgcactggctgtgcgcagaacagaagcttttcccgtattctcctggcccctcgaatcacagctttcttcccgctcggttgcatggatggggcggttagctggggccaaaccttggcgggaaacgcggcctcaaattactgctcgaggcccctgcacgctgtcgggtcttgggtggaaagatccggtgttcaagacgtgctctcagctcctacagcggcggctcggtggccggtcgctggtgagtcggagtcaaaatttcgcaggcgcacagggaaccgccgagcttcacagaggcggctgcttagctagttggtgggtggcgggctactcggctgcccggagccggcgcagggccgccgcaccgccggtggaaggacccattcccgccacgcagctgctctgcaggagccgcgaactgctgcccccttcccccagtcagtgtcgtgctccgtgcgtcccgctccccaccgtggcagtgcaagcctgctgggttccctgtctcggatggggcttgaattttcgggtacgagactgggctggcgacgtaagtgcgagcagaccgccgccgagcccgggaggaggtctgttggtctagaaagggttccggacccgccacaaaaattgttttatttggggggacttaggggtacaagtgcagttgtgttacgtgcatatattgcatagtgcctgccagatttttaacagggacgccaatatttattgaaggctttctaacgccagactcgttaaccagtgtacacctctggtttttttcagaaccattcccaccaaacggaagcagacttcaatctgcaagatttcagagacacggtggatgatctcatttcaggcaagtgcagtctcctggcagttaaataacagcgggggtgtcccccactcccaaatcagactagttcagatttcgtggtcgtgaaggtggtaaacccagccaactgtcaacgactctccagcaactcatcaaagagtcagccttttccatatttaggacatttctctcccccgtggagaagtcgaaccgctggatctacatagcgctttatctgggatcggtgtgagttctgggagagggagccctatgctgtggtgtggcaggggaggttgagtgacgagtgtgcagggtatcgaaggcctgtgtgacgtgcaggcccagggaagtgttcttgattgaattcaggtaaacttaacaggcatatgttggatacctgctgtgtatgtacaggctatcaggaagggcctcgtaatcaggcgtttaggagtaagggtgcttaatttaataaagaaaaatctctacatacaccctacacccagagtggcattttgctcctgtaactagctgggcatgaatttgaggctgcaaatccagctcctgctcttctccagactcatcctctatgatgtcgcctaccctggccagcggagacttccccttctctccttgcgacatatcaccattcgggccctgcctctccccgccactggacccacgggccctgcagtcaccaccgctgcgccctccagacgtgcccccgcctgagcaatactggaaggaggtggcggaccagaaccagagagcgttgggagacgcgcttgttgagaataatcaagtagggacactggtctggcgaccaggaatcctggggcagggacaggatatagagggtggaagtggggtttgcaagggagaagatgaggtcctgtgagtcggaaccagtggactgactggtggttcacgtagctgccattgctccggtggctccacctgtttccaaattcgttaagtgggaataattctaccccacctgatttttattttattttattaattaatttttatttatttattcattttttttttgagacggagtctcgctctgtcgcccaggctggagtgcagtggcatgatctcggttcactacaacctccgcctcccaggctcaagccattctcgtgcctcagcctcccaagtagctgggattacaagcgcatgccaccatacctggccaatttttatatttttagtagagacggggtttcaccatgttggccaggctggtctggaactcctgacctcgggtgatccgtctgcctcaacccccaaagtgctgagattatgggcgtgagccactgcacctggccattttatttatttttaaaaatagttttatttggggggatttagaggtacaagtgcagttgtgttacatacatatattgcatagtgcctgccagatttttaatagggacgccaatattttttgaaggctttctatgtgtctggccctggacttaccaatttatactttttcttcccacttaatgctcacaatcattgagctagatactcttactagccccgttttacaaggaaatcaagacataggattgttgaacttcggtgacagaacctagatctgcctgttgcccaagtcagtactctttatcagcacgctacaccgaggattaatggagataaattttgtccaagtgctttgttttaaaaaaaaaagtaaattgattattattctcactagcgtaaatgcctgtgcgtccccagttcctgatgagacgtcaggatctgggtttgattcatgccagatatgcagacgagacccagcacagta

SEQ ID NO: 1712 - DNA, 1705 bp, Homo sapiens
catttgcgacctgttcgagtcccccagctccggctcagacggcgcagagagcccctctgcggcgcggggtggtagccccctgcccggcccggcccagcccgtggcgcagctagatctacagaccttccgcgactacggccagagctgctacgccttccgcaaggcgcaggagagccacttccacccgcgggaggcgctggcacggcagccacaagtgaggtgctggtagagccagctccacgccgccgctcttcctctcctcccaggctctctcctctcctgccggctcggccctccgagcgcccgggcccgcgacagcccaggtcccgccccgagtcgaagcacaaggggccgtggaggggcgtcaccggcctcattttacagatggagaaaagtggggcgtagacggcttgagggacttgccccgtcccaagctggctactggggcacggtagagaggaattcgtttccgggttgagtctggactcctaccgaactcgggcaagttatttaacacccctgagcttctttcttcatctgcaaaatggaacccctccccttcctttgaattgctgagcccattacgcgaggtaacgtgtacgacgctctctgcacagcgccaggtcccaatcccggtgttccggctcagcacggcccacgcgtttcccagtttccattgcgtttctctttctgaaatcttcttgcccctctcctgggaagctccccgattcttcttggcccttccttcccttccacagtccctctccaccctaagcccagcgggcccgcctcccccctccttcccggcaggtgacggcggaatcccgctgtaagctgctcagctggctgatcccggtgcaccgccaattcggcctctccttcgagtcgctgtgcctgacggtgaacactctggaccgcttcctcaccaccacgccggtggctgcagactgcttccagctgcttggggtcacctccttgctcatcgcttgcaaacaggtggaggtgcacccgccgcgcgtgaagcagcttctggccctctgctgcggcgccttctcccggcagcagctctgcaacctcgagtgcatcgtgctgcacaagctgcacttcaccctgggtgcgcccaccattagcttcttcctggagcatttcacgcacgctcgcgtggaggcggggcaggctgaggcctccgaagctctggaagcgcaagccctggcgcggggggtggcagagctgagtctggccgactatgccttcaccagctactccccttccctcctggcgatctgctgcctggcgctggcggaccgcatgctgcgggtctcgcggcccgtggacttgcgactgggagaccacccggaggcggcgctggaggactgtatgggcaagttgcagctgctggtggccataaacagtacttccttgactcacatgctgcccgttcagatctgcgagaagtgcagcctgcccccgagctcgaaataaaacagatccttcgtttccttttagtccctggcccggctgctggacctctcccgtagcctcagaagagtgcagtactggtccacagagaaggcttcaggacctgcttggtcagctgcaggttgtaaatagtgtacgatactagcatctggtattttatttattttgcagcgagcacatgaggaagctgagtctttcaccaataaacagttgtggtttgtctaaa

SEQ ID NO: 1713 - protein, 57 aa, Homo sapiens
MLRVSRPVDLRLGDHPEAALEDCMGKLQLLVAINSTSLTHMLPVQICEKCSLPPSSK

SEQ ID NO: 1714 - DNA, 1501 bp, Homo sapiens
cctgcgccctgaggcgagtggttctccagccggaaaatcgcggctccggtgccgctctgggctcagccagtgagaggccgggggtgtggtagagagaaggagccggccgggtacttagcaccgcgccagcctctgagcccggcctccttcgcactttcgagtgcgcgtttgctgcccgccgcagcccgggcgttgaaggtagtaaagcggccacccggccgcatcatggtgaccccctgtcccaccagcccctcgagccccgccgcccgagcggggaggcgggacaacgaccagaaccttcgcgccccggtgaagaagagcaggcgtccgcgcctccggaggaagcagccgctgcatcccctgaacccgtgcccgctcccgggagactccggcatttgcgacctgttcgagtcccccagctccggctcagacggcgcagagagcccctctgcggcgcggggtggtagccccctgcccggcccggcccagcccgtggcgcagctagatctacagaccttccgcgactacggccagagctgctacgccttccgcaaggcgcaggagagccacttccacccgcgggaggcgctggcacggcagccacaagtgacggcggaatcccgctgtaagctgctcagctggctgatcccggtgcaccgccaattcggcctctccttcgagtcgctgtgcctgacggtgaacactctggaccgcttcctcaccaccacgccggtggctgcagactgcttccagctgcttggggtcacctccttgctcatcgcttgcaaacaggtggaggtgcacccgccgcgcgtgaagcagcttctggccctctgctgcggcgccttctcccggcagcagctctgcaacctcgagtgcatcgtgctgcacaagctgcacttcaccctgggtgcgcccaccattagcttcttcctggagcatttcacgcacgctcgcgtggaggcggggcaggctgaggcctccgaagctctggaagcgcaagccctggcgcggggggtggcagagctgagtctggccgactatgccttcaccagctactccccttccctcctggcgatctgctgcctggcgctggcggaccgcatgctgcgggtctcgcggcccgtggacttgcgactgggagaccacccggaggcggcgctggaggactgtatgggcaagttgcagctgctggtggccataaacagtacttccttgactcacatgctgcccgttcagatctgcgagaagtgcagcctgcccccgagctcgaaataaaacagatccttcgtttccttttagtccctggcccggctgctggacctctcccgtagcctcagaagagtgcagtactggtccacagagaaggcttcaggacctgcttggtcagctgcaggttgtaaatagtgtacgatactagcatctggtattttatttattttgcagcgagcacatgaggaagctgagtctttcaccaataaacagttgtggtttgtctaaa

SEQ ID NO: 1715 - protein, 342 aa, Homo sapiens
MVTPCPTSPSSPAARAGRRDNDQNLRAPVKKSRRPRLRRKQPLHPLNPCPLPGDSGICDLFESPSSGSDGAESPSARGSPLPGPAQPVAQLDLQTFRDYGQSCYAFRKAQESHFHPREARQPQVTAESRCKLLSWLIPVHRQFGLSFESLCLTVNTLDRFLTTTPVAADCFQLLGVTSLLIACKQVEVHPPRVKQLLALCCGAFSRQQLCNLECIVLHKLHFTLGAPTISFFLEHFTHARVEAGQAEASEALEAQARGVAELSLADYAFTSYSPSLLAICCLADRMLRVSRPVDLRLGDHPEAALEDCMGKLQLLVAINSTSLTHMLPVQICEKCSLPPSSK

SEQ ID NO: 1716 - DNA, 917318 bp, Mus musculus
  misc_feature (1)...(917318): n = A,T,C or G
ttgtttttttttttccctttgagtttgtttatatgtggattaagttgatggattctgtatattgaaccatccctgcatcactgggatgaaacctacttgatcatgatggatgatcattttgatgtgttcttggattcagttggcaagaattttgttgagtatttttgcattgacatttataagggaaattggtctgaagttctctttctttgttgggtctttgtgtgctttaggtatcagagtgattgtagcttcatagaaaaaaatgggcagtgtttcttctgtttctatttgaagagtgttggtattaggtcttccatgaaggtctgatagagctctgcactaacccatctggtctgggctttttttttttttttttttttttttttttggttgggggactattaatgacggtgactgtttctatttctttaggggttatgggactgtttagattgtttatctgatcctgatttaactttggtatctggtatctgtctagaaaattgtccatttcattcagattttccagttttgttgagtatagccttttgtagtaggatctgatgttttttttgtttttttttttttttgttgttgttgttttggatttcctcagtttctgttggtatgtttccattttcatttctgatttagttgatttgaatactatctctgtgacctctggttagtttggttaagggtttatctagttgcttttcactaagagccagctcctgctttggttgattctttgtatagttctttttgtttctacttgattgatttcaaccctgagtttgattatttcctgctgtctattcctcttgtgtgtacttgcttctttttttttctagagtgttcaggtatgctgtcaagctgctagtgtaaggtctctccagtttctttttggaggcactcatagctatgagttttcctcttaacacggctttcattgtgtcccatatgtttgggtatgctgtgactttatttacattaaattctaaaaaggctttaatttctttctttatttctccctttaccaagttaccactgagtagaacattgtttagcttccatgtatatttgaactttctaaggtttttgttgttattgaagacaggcttactctgtgatgatctgataggatgcatgggattatttcaatcttcttgtatctgttgaggcctgttttatgaccaattatatggtcaattttagagaaggtaccgtgaggtgctgagaaggtatatccttttgttttaggataaaatgttctgtagatatctgttaaatccatttgtttcataacgtctgttagtttcactgtgtttctgcttccaggatctgtccaatggtgagagtggggtgttaaagtctccaagtattattatgtgaggtgcaatgtttgcttttagctttagcaaagtttctttatgagtgtgggtgccctttcatttggagcatagatgttcagaattgagagttcatcttgttagactttacctatgatgcttgcttttttggaccatttgcttgagaagttgttttccagacttttactctgaggtagtgtctgtctttttcactgaggtgggtttcctgtatgcagcaaaatggtggattttgtttacgcatccagtcttttagtctatgtctttttgttggggaattgagtccattgctattaagagatattaatgaaaagtgattgtggcttcctgttatttttgttgttagaagtagaattatgtttatgtggctatcttcgttttggtttattaaaagtagattattttcttgctatttctagggagcagtttccctccctattttggtttttatttattatcctttgaagggctggatttgtgggaagatattgtataaatttcattttgtcatggaatacctgggtttctccatctatggtaattgagagttttgctgggtatagtagcctgggctggcatttgtgttctcttagtgtctgtatgacatctgcccaggatcttctggctttcatagtctctggtgaggagtctagtgtaattctgattggtctgcctttgtatgttacttgtccttttgcccttactacttttcatattctttgttttgtgcatttggtgttttgattattgtgtgacagaaggaattatttttctggtgctatctatttggagttctgtaggtttcttgtatgttcatgggcatctctttctttatgttaggtaagttttcttctacaattttgttgactatatttactggccctttagcttggggatcttcactgtcttctattcctgttatccttaggtttggtcttctcattgtgtcctggttttactgggtgttttggtttaagagctttttgtgtattttacattttctttgactgctgtgtcaatgttttctatgctatcttctgcacctgagattctctattctatcccttttattctgttgctgatgctcgcatctttatctccttaccttcaaacagttttaaaaaaataatttctctctctctctctctctctctctctctctctctctctctctctctgtgtgtgtgtgtgtgtatgtgtgtgtgtttgtgtttgatatgtgcacatgtatgtacaggttgacatgtgtatgtagatgcatgtgcctatatttgaaggatagaaaatggcatctggtgtggcttttattcccttagtacagtgtctctcacttaccagacactcaaagttcagttagtctggtcagctattatgttccctggctttgtctgtctctatcccagtactgtgtttacagcctcgtatagcctgactatttacttggatgctatggaattgaactcaggttctaatacatgcacagcaaggacacttaccctctgagatatcttctctggccagcaatttcttttataaacaagggtttatggtgtttggaggcaaaattgtgatttagataaccactgattctactacacagcactgcaaaaactgactgaaaaccaaaaacaaatcaaaacatacctttccattttcaatattttcccatttttatactcttgcaatggttctcctgtgaaactttaaattttaaagctgaaataagcctcaatgtagcgtatggcctaacttctgtttgctgggaagggggagatagaaaagatatggtctacctagagaagaaatcaaaactccatcctaatacctctaaattttatctgaggcattgtatctcctgttgaaaaaggcggctagacattttctgagtcattactcaaatgactcatgctccatttaatttgctagaaatacatggaataggatccagatccaacctacagagtaagtgactagccaggatgtcttgtgtttcctacctagtctgttaattttgctagacaccttaagatgtcagtgttctggtgaagtgtctgattaacattacgatgcctcttccttgtctcagaaagatacatcaagaccttctttttcaatgagaaataaaagaatgtcttcacacactttaaatttatcctaaaccatagtactagcttagctaatgtaaaatacactatcaattttgtgtgtgtatacatatacaagtttgtgtatatgaatgaatatgtatgaatacatttgtgtttacctatgtgtaagtctgtatatgtatgcttatatgtatgggtgcatttatatgtatgtatgtatgtatgtatatatgatgtatatgtatatgcatgtgtatgtgtctatgtcacaggaattttgctttatcaaactgtaagcattggcttcaactgtttccaagaaagatcagttcttcccttgggcattaacttagtcaggaagtttcatatatatatatatgctcccccctttgctataagagacaagtttaaagaaaactaccattatttaaactaccatactatgttagtctatcttgatatgatattgaattttatatcatatgattattttctttcacttgagaacttaatatatttacttgtagttagtttcatgtcaaaggaaataatgtcaagataaaaaaaagaagcctaggatattttccctaggaattagctcttccaagtagtgaaaatgaaagttagaagcatgtctttttaagtgcatgcacacacataaatttctaatgactctctttagttgtcacagtgcataacaatatttcattattttagaatattggcatgcaaatcaataagacccactttcctttggtgtcagctgttatactttatattaatttttgagcttgtcctttcttgttcttaatgcccatctcatgaaaaaatatgtattctagctagacatggtagaaaacaccaaggatccagcacttgggaaactgaggtataagatcctggagtttgagtagtctctgatgtagagcaagactgcctcaaacaaacatgatttcctcatacaataaattgtttgattcccagcaagcaaaaatacagagacagaggctgtcaaatggcacagagggaaagagtttttgctgtacaagtatgaggactgtctttgaatccacagtactcacataaaaagccatggtccacacatacttgtaaccccagacaagcagattgctggggatgccttccaagttttacacatatgcacacatgcacatgcccacataaatcttttaagatgaaggtttttctgttgttccatgtttaaactatgggctaaataacaaagggcagataatgcaaacacttgtcaactaaatgctttaatagaaaagtggtcctctgtgcctttccgtgtgtttcaatgtctgctccctgtgctggcatcccataataaagttggcagataggttggttcctttccatctttttccctatggtgcctacagctgaagtagagcgtgctgtgagttaagtgtgtgtagtcttaggtctttgggagtttaaagtgatcctttaacctgtgcagagctcactatgaagcccgactcacctggaagcactgaagtaactgaattcttgctggccaatattgggaagcgagaagggaagattgaagtgtgttttcatagcagctaatgaggcgtctaatgagtcaaatgtcgctctgaagctcacctcattaagacagcatcttgttttcataaatgtcctggagtggctggacaattatatatatatatatatatatgtgtgtgtgtgtgtgtgtgtgtgtgtgtatgtgtatgtgtatgtatatgtatacacacacacacacatatatatacacacatatatacatagtcatttaattaaaagaactgataagattgccaaacaaaatcaaatattcaaggaactctcttagcattggtgtcttctaagtgtgcaaataaatgccttaggaatatcatgagtgaggtagactatgcttctctcttttgttttttgtttttgtacaaaaccaatttttgaataatttgaaagaagattctgccatcacattaaatgtcccattgactacattttcaccaagagatttattaccagcccttctatttggtatactttcaataaacacacttctgctgctttcagctgagtatttctgtgttagatatttattgggcagtcattaagttctaaattgtttctcttatttttgacccacaacagagcatggggcaaaaatttgtctggatgcaaattacagagacaagtacctgggtgtattctaaacacctgagtagcctgtatacttgaatttaaactcctgaataaatgtatctcttgcatttaaactgtgagagtttgtttcctaacttggctcagtagtcagaaccttgtgccaaactctgtgtttctaataaggtaacaaccaatttgtaattgttgagtgagagaataaatcagtaaaatagtcgatctttgggccaatatttttcctcttactatttccttttcttctttacttttgaaagacagtatagacctctattttaagataaggaactacaatttgggtatgcagctatctctgtcactatataaaaacactgtgtgtgtgtgtgtgtgtgtgtgtgtgtgtgtgtctatccatccgtatatggataaaaatatgtaattagtcccagaagctatgggaaataagaactatataggcttttttttttcaaactctccaagctgcctggtaaatgtgtattaatagaataggctccagagggataggttttcaccagccatcatctctgttcatagaaagccttttcccattacttttctattttaagtctccccccttgccccagctgattgaacctttctgaaatgtgccaggcagaggctctcacctcgcctctcagcttgcaaataataacgtcttcgcattttcatggccttttctgaaatagagacctttcatttatatttcgcccacaatggaaataaattgattaccgtcaccacctgtttggccacagactttttgaaagtctctttttcgatgagggaaaagaacagcttgtcccagatttctttatgctccaaggacttggggcaaaggaattgtttcatcattacatgttattgaatcctaaagaattgctatctttcatttcttccctgtttgcttatgtttttccctggagccctcccaggcactggacccttggagtttagtaatcactgtgccctcctggagacacttcctcattgcttcttcatagttctctcacatttcccatctccctccccaccccccatctttctttgccttcagaaaatttctgtaccttaccttctacttcttatataagtttaaattttagttttacctattattttcttttgtaacttttattgaatttgttccttaaccgttccattcatgtataaactgtgctctgattactgtaacttcccaccttctctaatcttcctttctggtctatgacactgacctctatacagccccctgtcccaccctcatgtcctttttgttcccctttgtttttgaaatcctctgagtttaacaatgatctgtcatgtgactatgggtttgcaactatcaaaaggatggtaggctactcagtggatatataactacagacagtaacttttcgtcttgcagaatccataagtagtccatagttgagcacagaggggtaatacagaccctgttttgtgatagataaacaacctatttccaaattatcagttcggtatgtctttgcatctaagaataaccatgtacacgttcccttctgatgtatgttatttccctgaagccagttgctctctaatgatactacttttcctttgtgttgtcatcttcctactttttttattctttcaaatggaaatctttcttgactaaattaataagtactctatcttgggtaaggcttattctacattcccccatagagtcgtcttgctactggttccagcccctgtagccttcctagacatcataacaagtggccattgcttgggcacctctttctgatgtttataggttaaaagacaaaaaagcgagtctgctgtttgttattaaaagatcttggcagctggacctcagcccacacctcagattcccgatgtcagcatgtgctacacctagacctgactatgcctagaacattctccttgctggtctatgtcagtgtatacacatgacccatagtcactgccaaactagcctgctgcctactggctccagcaattcctatagagctttcttactctaacacctatcgctcactgccatttctaatatactaagatgtaaattgcttggcagaatgagtccccccatttgtcctctcatttctttgttcttaattcaaatgatcctcttggagctatcatgatggcaaggagacaggtaagtctccctatcctcaggaattttatactcactgttgacacaaaacacatgaatacgggaacacagggtgaaaaggaaggaagaatgcagagagacacaaggtattacctgagaggagggggtctgaggtggaaggaatgaaaagaactgagcaaagtcactcttcgtatggatcaacagtaaagctttgctttaagcccatgattgggatgttgcggtttaagtctgcagccccacatacttactgaagcccctggattcaaagaggatcatggtgtggtccactaaactgctgtccaagcctgggctcttctcagttcttacattgccatcttcccaagtctgtgttgctgggggtactaggaggagatcatagagcttatccatgctctagctcatcttcttcaactatggctgacaacctgcagcggaacaagcccagttgccatgtgtgacatttagatgatacaagcttaagcttgttattacggaggctgaagttcttttcagtcaaagccccattaataagagaagttagagatgaactcaaagggaagcttgagaacaactttattagaatttagagaacaatgcaggctaggtaagatttgcaagagatacaccccagcagccataaggaccagggagatggaagcacatcattgtaatggaaatgcacaggcagctaaatggcaaaaggagaggtggcttcagagggagagtggaaaacccagagagcaagggaagccattcttaacctttgtccagtatcagtacaaaaataaaagacagtaagttacacttgtctgagtcagaaagcagcccagcgatgccatgtgctctccctccacacgggcagcagtgtcccctcagtgggaacaatttctaggaaggacaggcacagtgtctcactgatggggtaatgatccctctagtctcctttaggatagcctggaaggtcgggtctctctacccaaagctagagaaagaacttagaacaaagataccgtcacttttccatgtgagactgtgaattccaaagccgatgtttacctgtcttgtgttacctgggaactggagattggaagtggtttctaaagctttagttctcccaaaccgaccatacaaaccttttagccccagtagtttttctgggccctgctgcaaatcagtgagggcaaagctagagtagtgaagaaccagcctgtttccatatttgtcttaaaagccatcttatattaaagaaaactaggtttattcatgtttatgatttaaacttatgtctcaagaattggggccgtgcctgacctgtacccttaactacaaatggttctgttctctgtgtttcaggaatggcaaccatatctttgtttcagaagttgtttattataaactacctttgttcaaaagggttgttatagctaccttggcatgaccactttgtaatgcccgagttgcccccacagctttgttttaggagacactaccttgtcctgtgtatgttctgctcatggaacctagcctgttttgcctgccaaattccccattttggaaaccctctacctgtgatctataaaagccatgtgtgtcttcctcacttccaattctgacctattgaacccctgcttagggggaggcagcctgtacacatgaatcaaaaggcttgctttaatacatttcttgttttagtcaatttggccatgatgatttgggtctgtggtagagatgtaggggagggaaaggcagagctaaagatttctgagctcaatcaaaagcttaagttgctgaagtcatttctcttgttggtttgcacaccagaggcaaagtgcctcagcagacagctgaagagcaggaagaggctctgtgtgtgtgtgtgtgtgtgtgtgtgtgtgtgtgatccttaacctcctcactcagcttgctccttcctgcatagcatcattgtttacttaggacattgaacaacataatgaaaagctcaggaacgtaaatatgcacacagtggattaccaggaaatgtgagcctctgcctttatctgtagagaaaggtcagaatcctccgcgagagcggtttcgccccgcccccccacccttcactccagcctttaactgcagctgatctttgatctcacttcctgagactcacagcagagggctgcctaccagtcgtatctgcttcctcctcttcctgtggatcagtcctctgcttggaaaacacaggtacccctaattcctaaagtacaaaagtccactctggaggctgctgggatggacagcagtgttggaggcagaccttttttgcagttataattctcctttctctgctcgtgctggggctttgttcgggctctagagacagaaaagcacacgtgctcctcagcagaaattcaaaccgcaacgatgcatacatactactgcagaggaagccaaaccccggggtggcatggccacagatgttcttgggacttcccctggtggtttcccagtgaaatgtggccacgttttttgttatcagtgttgagccagtggaggtacagccctgcactgtcacctttaacagccttaagaatttactctgtctcttagggacctcacttcagacccaatcagaatttgttgcttctacatggaaaaagagttttaggactagccaggatgggaaggagttgatgattgcattaaagatattttcatataccacttttgtggcccaaaattatgtctgaggagatcacttcgaaaccttttcttgaaggctggagagatgacttagtgctaaggagcatttagtactgcttttagatctgagtttacttgccttctctttcatcagtggaatgatgaccacctgtagctctagctccggacaatccaatgtcctcttctggcctccagggctgcagggatgcactcacatgcacacactcacacacacttaagtattttgtaataattaaggaacacttttctcttttctctctatcttgatgagtgtgattggagggcggctctggaagtgtgtttgttatctgtgcttatgctagagaaggcaacagtgcagtagcacacgagggctttagtacagcccttctcctgtttagcaggttctggcgaggttcctagaaaattgcacgtttacagctggggagtggaagagccttctttaggcagtagataattatgctggaattcttgcttctctgctgggaaaggcttctgactcatcctaggtaaggttcttttctcaaggccccataagtttaactgtctttatcctcccttctctgtcattcaagagctctgtgcaaatgagttaccatcccggagtgcagcctcatgtgagctaaagtgggcaagggtgctgaagaatttccaccttgtccttgagtagattctgctgtgagtctgagagcctcgcactcaggaaatttggaacttgataaattcatttcactttggggacatcatatagtcacaaataggagaatagaagctaccttgtctcgatgtcataagaatgaaatgaaatgctagttgagcatccatcaaccatgctgcccccttagaagcaatttcatggtggtatttaaagaacattgctactacctggctgtgcttgcctatccaagaacccatttccttacagacctaggaaacagccagcattagtctctttctgcaataggttatgacagggacttttgacctggataagacagatgctaagcatcgtcccttatctcactttaaagatactgtcttttccgtccatgggttgttaggctttggcgtgtgttctaggacataaagggcaagagtggtgtataaaggagggaagaagccacaagggacaaaagagacagctgatgaagttcatggtctgttggcaggacagcatggaggttgtggatgtgtgatttttttttacagtattgactgtggattttacttatcaagtttctcttctatgttttatttatcatatatattataattataaagtccctatgttatttatagacatgtctacaggctagtgtgcaatgggtatattcaataaagagaaaaggtactacttataaaatacaaagtgaatctagcctgaaatttttgtttagagaattaaaataaaaagatgactctgtgtatgtgtgtgtgtgtgtgtgtgtgtgtgtgtgtgcagaaagagactacttcagagtgctttgaaattggagattttttttgcatatattttttggaaattgttagcctatttaatagtggtgattgtgttgttttttgcttttgattccaaatgattacttaaaaaaaaacaaaacaacaacagaaaaacctatgcactataaactaaaaaagagacttgcaagtcatattgagtattcagcagaaagtaatcacttgatttcctctgcccaaacaattctttggttaaggacctaactacaaactcccaaaacccacattaaaaagcccagtgtagtgtcatacaatttaaaatcttagtattgtggaggtagagacctggattcctagcaatctgaccaagcctacttatcaaaccccttgctggtcagagaccttgcctcaaaaaaagttgttggcacctgagaaatgccagctgaggtttacttccaagttccacatgcaagaatatgtatgtatacttccacacaaacacacacatgcatgagagcgacagacagacagacacagacagacagacagacagacacagagatacaaggcaggggctgggggagagagagagaaacattgagagagagacattgagagagctattgagagagtgatctggttagagaaatactacaggttatactctgcagttgtaagtggattttaatgcaacaaaccttccataagttctataagaagaaacccacgtggtcagctgatctcatttcttcccagcactttttgaacatgggatgctttctttaagtaatgtctgttaaatcttccatagcaaccttggggagtgttatcctggtataatttagaaatgaaaagcaaaaagcaaagagatgatgtatcctagtttgctagatggtgagtctcttatactctctgcctgtgtcacaagttaaatatcattatcttgtacttgaaggggatgctaaggaaagagagttctttctctaatggtcttatgtggggttctaggtaacttgctttctgatcttttctgcattttgtatgtttttgtttaaaccctctcctttcagcccagcatacttaatagtcttgtgtattgtgtaactatatgactccattgtaattataattgtctttttttccaagccataagctttctctattccatctaaagcctgcttttctttcctttccacccccaggactccacactagcagaaacgccactgtcctttgttcttcatcttgaggataccccaggggataacttggacgatctgatttttactctgagtatatgcaaattccagcatactgtaaaaatttcccacattctcctcaaaagcctaaggacttctgcataatctgttccttaaaagaaaattaattgatattaattaatctttctcccctggatgacatttttttcttgatctctatgttggtaatacatcattcagtgttcttaataacagtttgtggtcctgccacttattcactggagttattaacttcccaaagtgcttctgctcaggatgtaccttccagagaaaaattgcaggtcttgcttgccagtcgtctgtaagctacagcagccattaagcgtcctgagctctttgggatgggtgcccccttttctttcttcttggttgacagtaattgtgaattcactgtggttgggtccaaaaaatatttgtcaaaacaagcacaaggatgttgatcaagtaggttgagggtttttgttgttttgttttttttatgtaggtgttacgtctggtctcaaagagttgtcactgtgctgagtgaagctcagctgtgaaggctgtcctgcctagtgagtgctttggtggagagtgttacagatcattaactaacactgcagtgcataagactcagtgggaagagacaccacaaaggaaccatacatcactagcctctggaagagcagccaggagcttttgacaccaacaagcttggaaactactggaatcattatttctcacctcttctagtctctcctcaccagcactcctgtgcacatcttagatgctcagagtactccattcttgaatatgtggtcactatgagaacttgatcattttcacccagattggacaagtcgcagcaccagcaccattctgtaggatgcccttctttttctcttcaatagcgttttccctgaaaccaccttagggttattataacatagatgcatcttcatgttgggcaatttccatatctttatttctatttctttcccatccagtgctggtagcattgctcccaaaactcacttgacccttgaggtcacctagggagcttcacaagttccaggcacctgtggctcagcagcagactctgatgtaattgatgagaggtatagataagagttcactctgaaattctcaaagaagaccacaggcaacaatgaaaatgtctaaaatcagttgaggtgatggctacacaactgtctaaatatattaaaatcccttgcaatcatgcatgctcctgacctgataatatgccaattatatatcaataaggtgtttcattttaagacaaataggctggtcctgatgctgtatgcctgtattcctagcccagcttaggctgcgtagagatacccaatgaacaaacaaaacttcccaaagaactaaattggaaagcatttcaaccagcaaatagggacacagggagctagaaacctactttaatcttcaaatattaagacaatcctggagattcattatgtcacagacaagctcttggcaaaggagtgatgcttcttgctttttccctctcccccgacttaccgtcatcttctgatttctcactccccctctctccctcttcccttcttcctctttctcattccctccctccctccttccctctcttcatttggaagcagagttggagtttattaaacaactgttttaatacaggcttaaacatgggtgtttagatagatagatagataatagatagatgactgatagatagatgatagataatatttaaaaggaaggaaggaaaggaatcaagaaagaaagaccccagagaataccctaagtgggcagggttcctcaaaaccaattgcgggattttccttctgtcttcccagagtctcattatgtcatattaggtaaacagtgaatccaatttgtaaaataattggccttggaataaaattctccttagggaataaaattccagtcttttcttagacaaaggcagggactgggttagttttcttacgtgaccagtgacgttcccagcaacctatagaaagagagaaatgctgctgccaacattatgcattctgaggcagctcactgttctctgtcctggaacttaaaaataaaattctatttaaaaaatattgcctggaattctaccttgccctttgtcaactttctgctgaatttggtaggaaatgtacacaaaaatagttcagctataataggagacacgtttggatttcagccccagaacaaatagggagcaagtggtgctgaggaaggcctggctttacctgccatgggagatatagaacaaaacagatatttgaaaggaaagaatggatctctgtcatgaggggttttctgaaactgtcctcaaggtgactggagtggcatggtgactcgtccaaggatgcttcgtcccaggtatagagatggtggttgctgagctcagaagagcttctcctcctgtgaatgaagaccgaggtcaaaaggaggagcacaacttacagctgaagaggaactctttagaagtggcccctctagaggcttaagctcgcttccagggacaagttttttagttctctttgcttcaggagataggtgctgtttaagtgttgagaaggctgatggtgcccttcctgtaggtactacctgtgacgacatagcttggaaactcaaggttctaattttaaaaccagggatttctgatttgtcatagaacttcagctactgttcattttgttttaaaaatagcattacattctttcattcttacagcaatgttatatggctctgatgcctttcttattagggaaaagcaggtaagaatttgatggcaaggaagagagaagtaggaatgaggcattacgttgtaaccatcagctcaaagagatgtgtggtatacagactctctcatttttcaaatgggattagagcaggtccaagtggaccatggggcctagaagttgcttggttctttgaattccccatttcccaactgctactccttaattctaccagttagtaagtcttactgattcttctaacatctgaccatatcttactctgctttctgctacttcactgaatcaagtccttcccattcgtctctgcctcctctctgcactctcttgactagtgtttcttgcaatgttgcttggctatgtagttcattctctttgcactttggagagtcttctctacaaatttcatattacctcttgctaaatgacctcttaaaggatcccatttacatttaaacgaagtttaaatgatgtagccccttatttctgtgtattttattcctagtttaacttggactaagttttcttttaaaagatctagaagagcctccccttaaagcaaccctttcccttgatccttgattctcacaattctcaaacagtgatgcaaacacaagaatgaatgggtggtatgtgcagctgcttgtaatagccaagatcactagcttaccaaagtcttaagatataaatgatttctctaaggatcaagttgttccagattctgatcaagtaagtctgtagggagttgacaatttatattcctctcatctgagtagtaagactgctttgtctcgtattgaactctcttgctcagataactctcttatccttttaactgatgttgtaggtgactcttgaaacctaggattggaagacaaacagagcaccctaactaacgactaacctgcatggcttgcttcctaactagctgtggtttctaacaagactcattgtccaaggagcctcctctggcagtctgtcaccgtgtcatgctcaagtgcactataccattattttattggcccagattacctaactgtctgaacgtagtgttgtccagcttgtttccctttttcttttggatcagagaatggaggctaattttctcaagctttctcttcatcactataaagggcaatatttaaaccaggtcattatcaaatgcagtgacagggcatagttattgcaagtggggcccgtttctttcattgtgtatccagcacttgacaaaaggctggttcgtggtagtgttaagtagtcaatgagcacctgaactgaactcatagatgaccgtgctagaataaacacacattcctcagtttctaataatcaaagggttgatcttactatatctccaaatgattggaacgacttttctactttttctgtacattaataaaattgtttttcagattcatgtattctaggcaatacaaagtagaatgtatgtgatattagtcatcattaatagcaggactttcccccttagctagagctgttaacgatagcaccatttggtcagagagcattgttcactgacatacccaagcaccggagctggcattattgcaaaagaagaagccaacattctctctctttttttttttttttttcaaatggtatcagaactaaaaatttcagtccctgaactgtttttttaaagtcaccatggataatggcctggattcttttgtacatttcttccagcagaatagaactattcacctgtactctgtccagatgggtattgcagatttggtcatttcaacacccttgacagaaggtgattttttttttttccttttcatctgagtctgcaggaaaaaatgactcaaacagtctttgactatcttatattctctcaatagcaacttacagccactgtgcttttgtaacttggctgtaactgccttaatcatggaaggcaaaggaggggtgggcacactaattctgttgataagaatttgtctttgagttagagagatgactcagctggtaaagcattaggaacagatttgaagtggatcctcttaataagttctagatcagtgagaaaccctgtctcaataagtaagtaagtgagtaagtaagtaaataaatgaataaattgatagctatgtggtagctgaggagaaccaaaaattatcctgtcttccatatacttatatacatctatacacacttgtgcacacatacacagcacatacactcattcacagacacacacacacacacacacacacacacaaacacacacacacacacacagagtctatctgttgtccagatatttcgaatgagtagctacaaaaaaacttggcttgggtctttctacttctttacctcaatgaagacctcagatccactttcccactgtaacttatccattagattaaatatcacatagcttgattctttctttggagaaagagtggagccttaaatggaccatcctgtggattgtaacagtaggcccttactgggtgctttcaatagatcttaagtactagcaacagggacaaggaatgaattcgctctgcctttaacggatactcattggccctgtgctagtggctttggatatgaaggcagttgacagtcttattttttctttagtaaaggaactctctctcaattacatctgtggcacctttttgccatcttccctatatctgtgccttgacacatcacatgctacatcaggatgattctcccactcccctgcctggagacaacgtgtcacttactagctgaggcccacgtgctcatgatggaaagctcataagctaaagttgaagaaagggtctcctttctctctttctattttacatttcttccaattcttaactgagaaacaaactcatgctgtcaacctgagttcccacgggggaagtaatgggaaaatccacttggttcctagttcaagtttatatttatctgtagcttcgtgaaggtgaatggggaccactcatagaggtggttttgccttccatacactgcttaggtcagagttcacggggaggctggtaaggaacctggacttaagcctccctttcctacctccaaggagatcaccatctataagatgtggagaaataaatgtatacttacgcatgtatgcaggctgtgtaattgggagatgggggatagaatggcagcatacactcctctactcctctgtgtgcatgctaattggttcaggtcttatttttgtgggtaagacctcaatcttgtataacaagctgtgttgctagccatggtgagggaagacaaggactccaaatggaaactatagttgttgatacattagcttgcttatacacttacaattatgcagtttctccaggcggtggtggcatgtacctttggaggcagagacagacagatctatatgggttttataccactctggtctacacagttagttccaggatagccagggctacacagtgctgtctcaaacaaacaaataaacaaacaacccaacaataacaacaaaaacaaaaataaaaacaaaaacccaccaaaccaaacaaaacccaaacctatgtagtttctccatcagagcaaatcatgtcacacttttgtattattaactgtgacctagaaactttgggagctatcatactgaaatatctgtacttggcttcctaaaatgtagggtactatctggttcccagcaatctggcatgcttccaggaaaaaaatgcataaaggacctcttgccatcataagacaggtggttcccatggccaccaacacaggtagtccccaaaatcttagcaaataaacttaagttttaggaaggtttgagaaacaattgtatttgcttgagagtgtttgtaggatggctttataaggatgtttcatcaatgcccacgagtggcacatgcttctcacattctggaactgagaggataaagagccatccacaggtacgcatgcttttcactcagtaggttagcggggaaagggaggttggtgttagcaaaccctgcctgggtaagagaactttggtggcatagcttttgaagaaccaagtattatactaagcattagcctctcaagcgaaagcagttgagctggtgattagactggaaggttcaataaggaagtaataaaaccttacaaaataaaaaattgctggaaatgggcattttagcaaaccaaaggctagcagggaaattgcagtagcagtggccagagagatgctgtgaggctgtaaacagggtaatcttgtggtaggcatggtctttacccagttcctttctacacagctttctccatcctttctaaacacacactcaatgtggcttcatgtttccttgctctccacagaatttcataggaatgagtacccttgggaagtgtttaattgtctccttatttctccttgtattaattccttgtacaattaaaaattaacactactgaggatttacagtttgctcattagtaataatcttgacatttactaatataaaactatgaataaacccactaatttaaaaattatgtcacaatcagaatgttctcatggaagctgaaagcccagagaaaaatgtggtctttagatatttattagcaagatgattagtcagaggatcatcacagaacgtgttatgtcaaccctaggagtttgttattcaagctcctcacagaaaaattccaggtgctggcacgtgtacaacatgatcgcaacttagtctgaggggggtggagccatcttaaggctatgtgaacagtgtccatggatcattagtgtaaagccggtttctggaatggaaactacaacttttgttaagctggtatatagccattatacgtagtgctgtgtttcaatctctcaaaggcacaatgtatatcagtcacattgagtctcatactctgaagttcccatccctgtctctctcttccctgcccctccctaatcttcattctgcttttgtatcataaaactacatctctgcacatgcacctgatccacatgtgagcaaatgcatgtgctatttgtctctatgtgtctgcctcttttcttttttcttttttttaagcatgatccccatttgcataaacattccagtgaatgatgtaagccattgcataaaagtgagtctgagagactggaatctagttctactcttctgtatgtagaggtcctctatattgtcccactaatctttaagtctacctgggtgccagttccacattgttcttgttactataacttagcagtataacttagtatataggttgatgcttccaggatatatgtttttgtttttgtttttttgtttgtttgtttggttttttttttgctcagcaatatgttggttctctgagatcttttgggcttcttcatgaagtggtttattttccccttattttcgagtgaaatgctactgtaattttcattaaaattcttaaattttaatttaagtgatttaaaatttgaatttaatttaaattctttaaatcgcttttggtaataaagacagttccaactgttcattccctctttgaccaaagaagatcttttgattttctaagatcatgttcaattacctccatgttttaaaataaacatagaagaaatcttcttttgaccccaactctacccactgagacagggtttctcagtgtagtccaggttatcttggagcttgctctgtagttcagactggtcttgaactcagagattcactggcctctgcctgctaaggattaaaagaacgtgaccccaccacccagctgagctgtttacttctttgcccaggttcattctcagtatttattcatttggggagctctgtgagtggactttgtctggtctctttctggtgtacggaaaagctaattgttttgatttggtaagctgctagtttgatcaagtgattgtcacatgtaagttttctggtgaagtctgtagatctcttctgtgcatgatcatatcatttacaaatgggggggggcatgtactgcttcttcccttcagtaccactttgatcgcacttgttagaaaattgaggcaattagcattctaagtgattgaggaaatgtatatatatcacttactttcatttattgtttttataatgtttggtttattcctaatccttgcttaatgctctagcctggttcattctttgctatggcctcatagaagtgtctcgttattcagtatccaggcttcctttagttatattctatagtgtaggctgaatagctaacagttcatttcatttgtgattttaacgggtagtctgtcttttgctatcagttctgaagcatagccttgatgaataacctggaccaacaaccactatcattgagagcatggactttataattttgtgtccttttggctcattggatttctggtgagaaatcagcaatgtttcaaagtttgctttataagtgacttggcaccctgggagcttttcacattcttttctggttctatatattttgtcctttaatgataatgtgaaatgggaaagttttgagtttcatttatttagcactgttagtgtctctgatacctgagtgacatctctttcttagatggtatagtctgtcagatttcattgaatacagtttctatgcctttagcttgaacagcttttccatcttgaatgtccaagataatgcatttgtttttttacgaatgtcccttagatcttacatgttctatcatattttcttcatttattatgttagaatataagtgttctaactcatctacctagtctttaagccctgatactcggtctgtcacttgatccctgggtgatacttcccacagtgcttttaaattttacttactgagttcttcatttccaatttattttgtagattatttatttattttatatgaatacactgtaacttctacacaccagaagagggcatcagattcctttatagatagttgttaaccaccatgtgtgttgctggaaattgaacttgggacctctggaagagcaaccagtgttcttaacagctatgtcatctctccagccccctcatttccaaattttaatttgagtttttctacctctgtaagggactttcttgtatgttgcattgacttccttgtttcatttattagcttgtggttttttttttccacttttaattcattccagagtttattcttattctttttgattttcttgaacattttgccagtgtcgtcttagaattctttggattgcatcgtatttatgctccctcaagcagattactgaagaattggtgatgtgtgcaggagctacaacaccttgatttctcatgtttcttgtggtttttgtgttgagatatgtacagatggaattaccttgatggttggatatttaaaacaatcacttatcttctttcagtggaaatattttcagtatccatgtctgtctacttagtgaagttgagctactgtttcattgtgcaggaatagaggtgtatcccagtacttaaactctcagtccatctgctcagagttcagtctccggtggaaagagaaagctgtctgtaggaccactgactggatatgctcagagtcaaaacactgcatagtatagccaagtaaataaaactgcctcttcaatccatatcatgttttgtggagtaaagaagggtgtgcactgatatttataactaagggtagggatgggaagaaaaaagccagaggaagactaagggttagttagtatcagggcaaggataaaaaagagaagaaggaaattgactgggtgagcagtaaagaggaagtgatagacaaatgcacttaaagagagaaggaaaagaggaaggggccagaaaatgcacccaaactagaataacactaaccctcaggaggccagaggtgtaactgtaaaccaaaggggaaagctaaaacatggggttagtgtggaagaagctgtttgaccaatttaaaattagaaattaaacaaagtgtggctaaaagagaatggccttttaaagacttttagagtcagtgtggctctttaccttggcagggagactggcttgtttctgttctatatgttagagaagtggaggccagtttccagtcctggcccccagtagaccctcatggggcgaggtctgagtgctggcatctcactgtgttgtctcttacatgggcacaagtgtttcatttgcccctgtgctggcttcttaggacatatgggtgagcagtctttctctgaagaggaacaggtatatgcctgtctcagcatgggcccttgcatgagtagagaacaagggtaaccaggtctgtttctgtctgctctagtctattgctcaaaccaaatttccaccctggagagaactacagttccacctcacacttgtttccttcattagaaatattctgcaggccaggtttcagtgtacggaccctggcttctgctctgagttctcagcatgaaccatgcagggagggacctttgctctagatctacctacctgtcagtttagcagagaaactacaagaaatggctcttgtctgtccattgtaatgccaagaaggcaggctttcctggaatcatacctgaatctccccagagaagtaacatgaatgatatctttcactttccttcctccttaccgcttctctctctctactttcttcctgcattttctttaaattatctgctattaaaatcatgatgcagaatttccaaggctctatcttaatcttaagcctgcctggtttggactctctgcaattgtccttgttctcactgattggagagcccacctcttggcatggctgccagctaagtttattacccagttggcttactattgtctgctctgaaaatatcatttgcctgccacacagtgatgccatttgatgggtagttggtatatgaaaggtagcttgggaagttcctcctggaggatgttatacagcccatttgggttatggaaggtaaaaggcactgcatttataccatgtagcagcaagcttaccaagtggcttctactttcttaactggagatctgagctcttggacatctgggtttaggagggaaaatatatttctctctgggttgtatggtggtggtggtggtggtggtggtggtggtggtggtggtgtataaacagtactaccttaaacttttaaggaatctggtaagagcttggaacagaccttgtagcagtttagtgtatagcagtatcatgtggtgctggtgtgcatccgactggaaggctggttagggagattatgtgagagtcgcttcaaaagtaaaatggaggggcaggggactaggggtgggagcacttgagtacacatgtctgtactgtcagctgagtgtccagggattgctgctcagagcctgtgccatgacacacaaaggcaaggacaaaggtgggagttgagttgtgccaacaaagcccagtcctagtagggctctcaaaagaagagtcatctaaacaagttcacttagagaactgggttaaaacttttcaagagaaatattaaaccagtttttatttttgctgtcttgaggagcaatggtccttctgatgatttgtatatgttaggcccagggagtggcactattagaagatgtggccctgttggagtaggtgtggcctttttggagtagctgtgtcattgtgggtgtgggttttaagaccctcatcctaactgcctgaaagtgagtattctgctagcagctttcagatgaatttctagaactctcaactcctcctgcattatgcctgcccagatgctgccatgttcctgccttgatgataatggactgaacctttaaacctgtaagccagcccccattaaatgttgtctttaaaagagttgccttggtcatgatgtcttcacagcagtaaaaccgtaactaagacagtgcttttggtatttgtcaaaaagtcaagattcaactgtattagttaccaatagctagcataagaaaaattgctttaaaagcaagtaccttgaagacagacagcagagcatagggtttcaatgttaggagaacatttttattatttccctctgactcaaattcccttttcagcagcacatatacagataactggtgactgcaaaccagccttttgagtatgatgtcatacttttcagcctactagacaagggaagattgtaataaattgcactcagcagcaagacacccacagattagacttgctcccaattgatttgtttctctgatgtcatgagaaagacggacagagggagtgcttgataatgtacttggcctgcccacttgccgctataagacctagcatggccataccacagactccaagtaaacttcatagctacttgaaaacatacatccaaaacctgtgagcagaggtgcacttgaaaaacttagctaagatggcatcatgtcttgtagctttgttcacagttgttgtttttcatgtcaccatgtcattttctatgatcgtgtgcctgtaggaaataatcattcacattaagttaaattatactaagtaagtacacaagttttctagctgcttctatgtcatggctgctttcctgtatcctagaggatacagtgagaggtatccttgccagcatagtgtgtaagtgctgacccccatgtagtatgtcagaaatgatttcatgtactttcataaaactgaaaggaagggcttgtttagccctaaacagagcacccttgtgtggtgtcagtgtggagatctttgtgaataggaagaagcagctataggggatgtaagcagagttacacacgtgggagatatgatggataattctcctatgttgggcaccggtctctttcatgtttaatttgttgtctttctagatcctcctgcctccttgtccttaaagcagtaattggtggtcacttggtttactgagaagctgtaagctcttagctaaagagaaatgggctctgtcatgttgcttcacttctatggttttacttgactctatatgggctgaatagatttacaatgttgacacaaactgatatagatcaagtgctttgtctaagcagacagtacctgttgttgatatgaagttctcttgctactatgaaaggttataaagtctgggaaaagatggagttggtcacattttcctgagttatctagagagataacttcatgaaggcttcctataggaaaggacaaatattttctgtctcctgtagatttggtctgtctttcgtagtgctcagaagactatagatagccattagaatgtacctagcatcttgtgtgtaggggcaataaactggccactatgggattaacaagaaaggactctatacccacacccaaatgtttctggagtttatttttctttcaaggtcatgaagagatcaaaagtagcaataagaaaatgaccaattagtagtgtttcctttgagaagttcagctccaggaagccctttaaaagcaaagatgaggataaagaagaaggaaacaatgagacattattatgggggaggtaatcactggtgtgtaaatgactaggaccacacaggaaaactgtttcggtcagtgtgaatcatgagaccagattgaatgcataataagcaccctgcaacctccagctctcctgcaggagcctgcctgtagacagaagtatcccacctggcctgaacaatggactcacatgatgggattcaggtgctgggtctcagtgtgctagctcattaccagtgtttgatgatggtcattggtaggcagcctgagcctcattactgttcaaaggaataatctaataattaaaagttttcctgtattataatggtgatagatagaataaaagggcaataagatgggtagtaatgttgtttccctgacaatcacctatcagagtaaaaagggtgaagaaatgggagatggagggaatgagagagagagggaggcaggtggagaggcaggatagagggaaggaaggagaaggaggagggaagggaggaaggaggaggaggaagagaagaagaagaagaagaagacgaagaagaagaagaagaagacgaagaagaagaagaagaagaagaagaagaagaagaagaagaaaagaagaagaagaaaagaagaagaagaagaagaagaagaagaaaagaagaagaagaagaagaagaagaagaagaagaagaagaagaagaagaagaaagagagagagagagagagagtgtgtgtcagagtcagagtcagagtcctactattactcctggagtgctgagtggaccctatttgtctagggagataggaaggtctttgtgagatatcaaaagaccctgagaaggaaccctagctgacaatgcattgtgaacccattatggtagaagataggtcaaaactccactggcattcaaattcatgttttacaatagaagcttgttcaaatgaggaagcttattttcaacaaccttgaatgagaaccttgattattgctgtagaaataaagtttgcccttgatggctttaatcaggacaaaactaagaggctagcattttattgttatgatctcatttaattgataccttatcaggatctgaaagaactcaatgggtagagggtttgtgatggctttggggcaaaccctggatgtagaccttcttgttttaaagtgggttttccatttgttatagaggagggttaaggggatatttggattggaaagttttagacatcccctcactaggttgtatgatctgtggtacactgttaagtaaataaaattatcagtcatgcaattaccttgtatataatataactagaaattgctgagtgtgatagaccacttaaagtagaagagaatagaagtgacacatagctgtacttggcactgtaattaaccctacactatgttagcaaaaacctgtgagtggtattgctttgttacacacacaaacattcacaaagtccacctgaatcagaaattggtagaataaatttttcctgtgtgcagagatagtaattgtattgtattaatttgtatataaagttaattttttcagtattagtactcaaaatatgataaaatgtatgcacttatgctttggtgtttgtttttaacttttttcaaagatataaagaaaggtaaaacctaattgtctctcaacctctgagggactcatgcattgagtctagcatgtggtttcagctactagatgagtgtagttgacttaacattgacactgatagagtttgacccccattttggttggtgactcaatatgtcaacctggttatcataaagttcatgagaaggaccatagcagttgagaagaaggatgctgcacatcacatatgaccaaccagagaataatatgaagcagtgttcaagagtttactttccctgtgcaatattctgtaattttctttctgctatcagtcaataggcaaacatacttgggttgtcttttttgttaagttaaatcatagcctccatgagatagaggagttatatctcgcttaacctttcagtttagaaattgccccttttccctaagcatctgtgatttccagagataattatctacaaacaagatgttgattttttttaaaaaagggctgcaataccaatattgttgtgtttttttctctgtgtttagtttagcatacataaaattgaagactatacttttgcacttatactgctgtgctttatagtcaaggtggcatgcaagtcatctgttcattgacatctacattcattagctgagaactggatgtctctaggcagactctcctgcctgtgcttcttgtagaagatgaaagcatgcagaaaaaagaacagaattgactctacaattatgagggaaatcaccaatcaattttagatttccccttatgcacaggtacatagatgcctttaaatgctctttcttttttttgcttcttttgtctttgagtatcataaaagttgatgctgctccaagtttcacatgagtacagtcaaacaggcctcctctgctgaacagccattatttagactttttccaagacctctcacatgatagtgctctttccttctcttgttatcatccaggttcgttctgctaccaactagttgacatctccacacactcgtaagtcacaagactcatagagggatcaaaggccagcagtattccttaagcgtgtctgccatcttttaacttagctactttctccttctcctcctcctctttttcttccttttcctccttctccctgtcttcttctccctctccctccccttctttcctaccccctcttccttgttcttcttccctttctttttccttgttttctatgtaacatcctttgctgtccaggaacatgctttgtagaccagtctggccttgaactcacaattgaaccattaaattagttttcagacacgctggagtacagattttcccacccccaccgatagagagccattagaaaagtccagcacacggcatctgatggcttgctagaggttaatctagagttttgccattcacagagttttgtcaggacataaaattgggagattgttttattattcacagtgaaccttagcaccccccagctctaatgaaataacatcttcaattttctcattaaaaaaaaaaaaaagacttttttttcccaatcttttaacaaaaggagcagtgtttctttttatcatgtttggtttcctggttgcctaggagacattagtgttcatggtagattgctctggctaggacattttgaagaagtcattccctctatattgaatttggaagtaatgacaatttgtataacagatttagcgtattagagaatgtccaatattgacagaagttatatggaaatgagccatctcccctacacgactgttgactacaacacattacaaaacatgtcctgagaactatttagccactggtttcaatagccttgcaagtttaatatcttctgaacatggtaatctttaaatctaggaattgttctaagtggcaatcagaagggtgtatgagggcaggtgtgcaaagtgctgcttccatccggcctcccagagctttaaggatatgtctaatgtaaacctttaaaggctggaagcaggaagtaagcaccagctgctgttcctgttattcggatgctgggttttaactgacacatggcacaagagaggtagcatcatctacgcagtaccgggccaaattttattttctctttactgactagatgccattctatgataataacagtactacgtttcttaccagtattaaattttgtattaattaacaactatctcttggccattaaaaaacatccatggctattttttgctgggataaaaaggtagcggttaaccaaatacttattaggtccttaagaagttctatgggaggaaattattggtgccctgtatcacagaggcaaacaggcaaaggaacatgccacattcatatgatcaattgaaaaagaaaacagatattgtacccaagtctgtctaacccttatggaagttctgttggagttagggtgtgacagagcctaagaatctggttgtcttgaaagctttcaagttgatttaaatcagcttggctttatagctagcactctaggggagttctttctacacgttaaagtgtatctctgctgtgctgcacaatatgcattgtttgtatctctcaggtgaagcacatgttcctagtcagcaggctagagctggaatggctaacctgcttgcagaaacatagcatctttgcattggccttggagaaattttttgctgtatggactagggaggtattaactatgaagtgggacccagcggcttcttggtagtcagtggtatagaatttctcatctttatgggtttggtcgtgtggttactggaagtcctgaggttccaagtatgggtcatggattttggaggatctaaataaaaattaaaaagtcagttcatagtagtctgtgcttgaagaggcaatgtggaattaatagacataggcttatattctgaatcctctgttgaatttcttaggatgagtattgctcatgccttcaatactaagggatgcccccaaagtgagttatctataatttaacttcttaaattagggtctcaagtttatagaatccttaaatcttacactttataaagatccatgagaccactgaagttcagtgctcatttgagtaggccacttgcattctggacatgctcagtgtctctaaagtgcgactgctggatctaagtgatctcacaagcccctttccacccagaaattctagagttagctattctttcttggaacaagatttgaagcatttggcagtttagtgagacattagcataacatttaaaagcaaaccagggataaacctggccgaccatggaatgatctgtcactgttcgatctggccattgaaccttattctatgaaccctatagctcaactattcctatcagcaacaaaaccaagcagctgtgctgagtcacagacttattcatataaggcacagaaatctctgtgctagttcctttctatttggttaactttgaagaggaagttcttaaactcatgtcctcttcctagcttccaagagtgacgaggagctagggtgttagcagatggacagaggacacatgtaggtcataggagggaggtagagagatgatacttttcatgaatggaaatttgggagatgtaggaaattccagaaccttacagttttggttaaaagcaaaagcagttactgccacagaatatcaagaagaagaaagaaagcttacatatataagagcgtggttttggttatcatacctacttcctcttttctttataacaggagggaacaccaagttctttactgactgacatctattaataaatataattcaggagcatgaccctttgagtgagtcccataactaagtccttgattttctgaattccagaaatcattatctccatgttggctaagaaataggtttttctggatatgattttcatttggaattttaacagagtacatctaacgttcatgtttggtagaaatgattcagcagttttactttgggctaaaataaaattgcttttgccatgttcatatgagagtaaaatatttaatatttatctccttcttgcagacaatttcagatcctggatgcctgcatcttcccatcacactgctgattcttactgtggaaccagagtagaccacatacatacttgttttctctttacagtctctggaatagttctctttttcagtgaaattaaaatttggggaaataagtctattagctatgcaatttgtacaattaccagagagacagtattagaccactgtagaggaagaaaggaagttgaaaattattactattttggctgcctatgccatgtactagacaatgatgaatgcttaatgtatgtcagcgtctctcggttttagatgtgatccgaaggtgagaagttcatgccattgcagagggtcagagaggggatggcacagctaaatcaggtagagaattcttaactctggctccatttcttcctccagaaagagagtgcttagagttatgtctatcatcaaaggagaagaagaattagtgaagagatcagagggcatccgtgttataaattgtttgcagactagacgaatgtaaaaatatgtaatagaactatatgagtttattggcaagagtggaatgttagaaggaaggaaattcacggcagggtagccaggatacaggggaaacactggatataagtaagccttaagagctgagtgaatgaatgaatgaataaccagtgcatctcagttttctcatctcaaagaacatcaggatgaaacagatatgaggaaactcagatggaccattgagaaaaacagaatgaatagaactatcagaatctttgaaaagctgaagtgttaccatgtgccaaagagtatctgaagataaaccaaacatctaaagaatgtgatggaaaccaacgacctcacacacactttatgagatataaaactatcagaaatggtagttcagtcacgcctacccactgaaaggatcttcagcatatgtccttacttagaagactctgtagatatgattgcttcatgatgcaagttaggctggaccctaaatataccaccttctctcattaatgctgttaatagtgtgtgtgcagatacatggacatgtgtgtgcacttgtgtgtagaagcaaggggtctttctgaggtattgtcctcaggagttatccatcttgtgttctgagaaagagtctcactgaaagctttaggcaacaagaagtttgccaactgagatatctcctttgtattgctctcagtttgtattagtataagatgtgaagacatacataaaaggcctcatcaagatggagtatctggggagactgagtctggagtgatgaaatttccatgccagggagcatggggggttgttgtaagccaacagacactaggaagagacagaaatcctgttttagagacttgagaagaggatagcctttggctttgggataatttatatggtaatggaaggatattaatatatagtcttatgcttaggcccttatgcagaccttattttgagatttgaaaccagaacatcctgtgttaaaaagtaatctgcatgccagccaattatcttctacagttgtgtgaggatacaatgaagccaaggtcagaagttttgaaacagtcaaacttagagtttagactgttattacagactgcttatttaagtgaaagggttaactaaatatattattatgaatagaatttcacagcatatacatgtagaccctttctaaaattaattttagaaactagagtataacaaaaataaataaggaaatctaggaggaagattacaaaatgataagtagagaatttagattcttttaatcaattagtaatgacaacttttgattctagggaatccatattcaggaaacttctccactaagcagatttttaaagacctgtgatggtttgtattgcttggcctagagagtggcactttaagaaggcgtagctttgttagagtaggtgtgttgctgtgggcatgggctttaatactttagtcctagctgcctggaagccagtcttctagcagccttcagaagaagatgtagaactcttatctcctcctgcaccatgccttcctggatgctgccatgctccaaccttgatggtaatagactgaacctctgaacctataagccagccctaattaaatgttgctcttataaaaattgtcctgggtatggtgtctgctcacagcagtaaaactctaaccaagtcaagacagtgtaaggtacatgggtgttccattagagggataactgaattttgaagaaaattgtgcaccaataaccagaggaggctcaggttaaagaggcagcgatattggaagccattgcttcacagtatgaggaagagggtgtttcacccgtgaacatgcagtatattgataagatggaaaattgagcagtgacattgaaaaaataatgcaattatttgaaattataggccatgtcatttgaacatgtccaaaattcaaacatgagaaaggtagagtgtagtatctgaaagacaacagcaggagtaagggtgagctaagggtattgtagagaaagctcaatagagtacgtgatgaggacctgagtgcaattcacagaatccatggacaggttggatacaccttattatcccagtgatgaggagtagagataacacatcctgcaggttcactcatctcccagcctcacctaatcagaaaggcagagatcttaccttaattgagataggcatgagggaagaaaaaaagagagccaaacctaatgacaacattggataatgacaccaaatgtaaagagtgagtggcagaaccataggggttaaatttaccaggcatcttggctaagggagagaaaacaagatgctagctggggtgcatgatttctttatcttacaagcatctaaaaagggtccaggctgaagatgggatgatgaaaaaaaagtccatttttgtgaaatatgagcaaagcaataaatagtgagataagtcagaatgtagatgcatgagtatataacattgtgatgtacaaaactggaagttatggcttttgccattgatttgacaactatagttagagatttagctcagttctactaggaactaatgaagcagagatgaaaagcagaggcaaagatttggacaacaatgaattcaagattgaattctataatgttgatatattgaatatattatagattaaaacatatattgaaatacaaacacgcacatacagctgaatgagaacagaatgcattttgttttacagtgtttgagttagggatatggttcctctgtattgtttcaggaagaaacctcaaatgcaaaaactggcacaaaggttttcttctccatggcttggtaaattagacctattaacaggcagatagcagaaacatccgaagtgtttagaaactaaaaggcacactatgaaataaccctcaagttaaatagaagtcatgacaaggaccaaggtttctgggaactgagaaataacaaaaaccctagaaaagatacagctaatgggcatctttgatagcaacatgtagctgaagctactgaagagaaccagcatacaatctgtgtttgcctccactaagttaacttgaagaaagaggagagatgaagaacttttaagcaagaaacaaaactatagaaaatgaataatggggccaaattaataaaacctgaagaacctttgttgattctttaaaaaaaaataagttacagataaaccttgaatgatgggttaaaaaatattcacagtttgataaaatccaaaacagtgattattaatcatattcttaacccattatattattactttatgagtaaaattaaaattggtacaattttatggtagaaattagtacaagaaaaaagtcacttaggtaagcagagactttcaatcgttatggtgattgtcaaacttgctcctgcagtaggaaagggcacagcttgacagagctctgctgacctctaaagcactggttctgaaccttccaataacactgcagccccttaataacgcccgtcatgtcatagtgacccccaaccataaattatttcattgatactataaaagtgaaatgttgttaatattatgaatcataatgcaaatatctatatgctatgacacctataaaagggccatggcccacaggtcgaaacccactgctaaaggaacagaaagcaggtgtacattttcttttaaaacaagtaaaccaagccagtacatttaaatagatgttgacaatgactaactgttaagtttagtttaaaaacttttggccgacttcacctacaacacccaaaaagccaatatgatcgtgaacaaaagaacaagatactccaagtggctaggaagagttaaatatattcagcaatctgctaatgaagtatatcacattgatggcaaagaatacaaaattgtattacacatataaatatatgtagtagaattttgtttatttaaaatagtactaatttatgggaaatttagattttattcatcctagctcagtatacaagtttcttctttttaaattaaaacttatcaaggatattattcttttttcttttttattacatattttcctcaattacatttccaatgctatcccaaaggtcccccataccctcccccacacttccctacccacccattcccattttttttggccctggcattcccctgttctggggcatataaagtttgcatgtccaatgggcctctctttccagtgatggctgactaggccatcttttgatacatatgcagctagagacacaagctttgggatactggttagttcataatgttgaaggatattattcttaatagcaaaagaaaaaattatgctagttcattgtaattttaagaagaggaaaaagattcttttgttgcatctacttttgaatacattgccagagacctctcaaggaaaaaaaaaatatttgagttaaagtgagagcaatcacattacttctaaatgaatcttatgtggaaaaccaaagaagctctgtgagggccatcagcagccatgtaggagttcccagtacttcataatttaagcaaaacgtcacatggagcatacaactaagtgttaagaatgaagataaacagctcatagaagaaaattctaaaattcacatttgtgaccttatgatggagaaatatttgttaaataagaatcatagaggaaaatatcaaaagaaaattaatgattttaattataacaaaattagtagattttattccttagggcaacaacagaaaaattaacagatggtaaaagtgtaattatcatactgaatatttagaccattttgtggactctggaaaatcagggaatagaagaagggtaactttaaaaatgagaatgaagtatcagtgataagtgagttgagagataccattcttatttattttttaaattttacccatgagtactgtatatgcataatctctatttctctctttcccactctaaatgtctctctttcctaaacttcatattcttctttaattattgttacacacacatatatacgtgtacactcagattcacatatatatgttcatataaatatattctgttagtccatataatgttgctttatgtattttggggatgaccacttgggactgtgtaacctatcactggaagtaatacctggaggagaactggctcccttgttgttcttcatctatgggtcagccaacatttcctccatccataatgatttcattgttcaaactggtactgtcatttttctggtctcttttaggcattggagtgagaatggtttaggtagggataaggaaaagctattggataagctgtacctgggttaccattttaactatcagtcatgaaagcatatagcattaagtgatagtaaggacagaggaaaacactgtctttggatattacctttaaaagtgaaaactgttagacatatcttagaaaagctgaatgacattgtaacctagaaccctgtcctagcacaatatgatatccattagggtagaagtcacagtgttatttgtgataaaatattgtggcaagactaactcttgagaaggagcagactgcacacaaaacccactgcggtttgctgtgagaagaaatgaggccccattcattatttttagcaatactgaggggataagacaattaagaaacaaatgaagtttaaaataaataattcataaaaattaaagttcaatgtttttgagagcccttcatgttttggagatatagaagacatgcacacaaatctataaagaagataagaactatattaatcgtgctatagtgaatacctgagttgggaggagatagagtggtttagagcatagaggatgaaaaacaaaaaacaaaacaaaacaaaaaaccaagaacaaaatgaaagacaaatgagaccaaagaaggtgcaaatcaagggctcagaataacggcagcccatcagttagagcacatgcttaggtttgtccaattatccttaatgcaaacacatgtcagagatgttgctcctcgcattgttagacagtggctcagacaatggcattaggtgtgggtttgtgtctctgtttgctgatgtgttaactctggtgaggcagctgcacacttgaacagaatagacagtccagctttaagaaagagccttctgttcagtgctcagctgatggatttgtcttttgtttcactttgttctccatgacaactcccaaagcagtagtgtgctagaggacaatgggcacttgagtcgattgctaagacctagattcagggagtgagaagagccttatctatagaatatggtgatgcattaaccttaaaaaattcaaggtaacatggttggagctataggagatgcaaattcacatttctggtagcttctccgagagcacacctgcaaagccatttggttagacaatatttgaacttactgacccttaatttctatgagttggttgtaggagttttaaaaaacaagtatccttgacatgagtcttcccatctgagtccttagcaccagaatttcagccatgttcccatctactaccctacaggtattaatacaggcatatctttcactgtataaatcactatgcacttattggtacactttacagaatagctttccattttctaacttcatcctttttttctgattatttttcatctttcatccctgtattttttctaggttggccactggctcctgactgttcacttgactaaggcaagtgtagggaccttggtcacttaggagtcattttcatggtaggcattacctagttgagattatatctggagcgtgggttgctttggtccttcctggctgcccagtttcacttcattctcccttgtgttcattctctctcatgttgctctgacaaatggtttgttagaaatgacttgcagtagcaaggatttatttgggttcaagatttcagagttctaatttatagaaaatcatggtggtgggagcaagctgtagcttggttgacagagatcaaagggagagagacagccactaaaaggcaggtgtagccttcaaagctcagcccacccactattctacactctgcaaccaacccccttctcctaaaattttgaaaaactccaagaacagcttcaccaagtgctcaactcataagctcctggggagattgtatatcaactgtaacattttctttgggcctctcccaaaaaggaggtgtgggaagatgagcattcattatctgacctctctctgggagagctggaaactcacctaaaactgttttgctcattccttcagtttctttctaattttgtcaattgaattacaatagttctctaggaatgtgtgctttgtaattgtaggcgaggtcaaacagtgtttgtacttgtgttaaattgccattacacaaacaaagataaaaccatttaaaagaagctgttaagaattagatttgtactcattcacagtggctatttgcatattaacagagatgacaagatcagtgggcaaaagtaagtattcaacaaataagaccttgtaggtttgaggtaacaatctgaagggccagagatttaggcatgaaaggttgctttgtcacccaaggagctaaaggggtctgcaaccctataggtggaacaacaatatgaactaaccagtacccccagagctcgtgtctctaactgcatatgtagcagaagatggcctattcggccatcactgggaagagaggccccttggtattgcaaactttatatgccccaatacaggggaatgccagggccaagaagcaggagtgggtgggtaggggagcagggcggggtgtggggtgggggaagggtgtggtatagggaactttcgggatagcatttgaaatttgaaatgtatataaagaaaatatctaaaaaaaaaaaagtgtgaatgttccagcactttgaatgttccagcttctacttgatagcattcacttgaatctaggctgcattctagcgagatgggaaaattccaggaggactttatctggagttcatctgagggacaattaaaagggaccagtttaaatgggatcccattctatcaaagagtctttactaatggaatttgcctttttaaacgtgctacatgaacttcattgctttctcttttgaatgcttatttcctaaattatttcttcttccagcttttactgtgagaccatgtcatttagatttggccaacatctcatcaagccctctgtggtttttctcaaaactgaactgtccttcgccctggtgaataggaaacccgttgtacctggccgtatccttttctgtaaaagaagcatttgaagtcaatcaaccaaattagcagtgaaccagcctttagagtccatccccaaaaggtaagcaaggaatctcccttcctcctgctttggagtgtccaggtaagatgttattcatatttattttgaatccagttggtggcacccgcaatatgcttgagcaatgttgtagaacttctaaggagggttgcttagcaactgtagctttggatgaaattcttggttgaccttttcactaccatagctgtgtaaataaataggtgtttctaaaattggttcaatgaatatcatgggcactttgaattccttttacttattgtgaattttaatagaaggttagaaacaggatggtgactctgtgatgggcaattaagagattacaggagaattagagttggacagttttttgcttaaaggagtttgttcaatttatccttttattttattttatattttatttgtgtgattgtaatataattacatcattgcctttttccttttcctccctccaagccctctcatatgccacttctgattctctttcaaagtaatgtcctcatttttcattaactgttgttagatgcatatatgattatacatgtatacacatgtgtattttaaaatataatctcagtcttcatttttctcatatttatgttttcaacattgatgatttggtattgcataactaattggtatgtcttccctggcaaaagaccatttctcctgttctcaacatccttagttgcctgtatttctctgcataggcttaagacttcatggtctttctccattcacatctctcatctattggtgttgtccctgctcagctcatgtttgagcattcacattggtgagagttgatgggtgtagcttctgatgctaggggacacaatctaacatattgtgaatgttgggatctgtgttggagtttgaaatgtcatttctcttgggatagattctggtttctagaccattctccactgtgagtggtggttgagttgctttattttgtctgaagaactttacttccacaagactcaataggaattccattctcctcgatactggaggtctgaatgggtgggacactccacaaaggtgccctagcatgctgaacatataccccctggctgtatacgtgtggattttatggaattgccacaatatttttctctttctccttattttattatgcaaggggcaacaaagagggttcatgttttaagataataggtattttccacactcaaccatggtttggctttgaagtgaaatccttactatagtccttaatgtataaacatttcaagatatttttggagtaatattttttcagtgaaaatatttgaagttcttaaaaacttcatgagtaacttatttcctagtcatgtaaactttgcttggttgaagggaaaaagggaaatcactttagcaaataaaactataattctttactaagctctcaaagtcctgagcacaaattttacctaattaaaatttgtgaaattataaaaaggatgaacagttgataaattagtaaataatattctgtgaaaattattctttctaatattcaaatctctttttgcaattttttcaatgtaacattgaaccttagtagaccctgacttcttaaaataaaagtatcttttagttcttcctttggttttactgtaagtttgtggtggtcattttgccttgtggaatttttcaagaaaagtacctccagatgtcaaaagaataaaggtaaaaattccattatttttccatgtgcttgcttgaatcagcgttaagagaacttgggatgagaatttaggtgaatgaatcttccttcatacactggattaggaaaacatgatgtcatgcagacacaccgcatgttagatggttaatggtggagtggacttgactttgtgagttctcatccataacttgatttctttttcacggtctttagaaccactagttaaagtgtgaaagccttcttctaaggaactggccacagtgaatcctgagtagttggtgaaactagtaccccagagtcaccattttgaaagtgaaaccttatcagttttcatatctgagagagaatgcaaagaggatagagaaaatctactagaattagcaagcatcattgtgtttagagggagcctgcttctgtgcaaggaggacatgaaaaccaggatgctttgggaactagcacattgtgtgaggctgctctcatctctgcagttgaaaactgccttggacctgggcagagaagatatttcttggagcaacgtgaaaatatgtacattattatacaaataagtcttacaaccacagcgaccctcaacactcatggaggcccacaccctgctggctctgtttcagggccaggaaaccatatcatactgtcccttacacatggtcaaacaggacttgtactcttagtaaagatatccttgttgtttacgacattccatgtgttcttccatggttcattcaacctttgctgactcaacccatactctattcctcacaccatgacctgtatcccaagctgccacagaatggagctctgtgctcttgcttgtctctgcataaaatcattcctttctgcctggaggacttgttctgaaactattttcttaacatgccaagtactgcagtaactgaaattaaaggagaaagtgcaaacactgagagtaaatgcagtggtgtagttaggggatgggggcaatgagggcctgttaactttacctagtggtatcaatgtactatcccagagtttctagccttgtcctgaaactgacttccctgacattccccatcctgttttgtcagttacaattctgtcttaagttgtgtgttgcttgactggggaaaaggggtacattcaaagacaataaatgaattgatggccaatagaaatctttgatggagagttttgtgttttcagggcagttttatagtacctttatgtgaaatggaatgtcttgctttcaatagttgtcttattatttctagacaatgataaccaagcaccctttggggagtgtgcactgatgagtgacttataagcattatctttgagttgtctccaccagccccttttccttatgattttactcattgacttagaaggaaatgtttatgtgtctatcagtatctctgggtggacacacatcctcagggagaacttgggtgccagtccttattttccacaatatttacgtaaaggtttcttactgtctgagagtagcttcttaggaggcttctgtctatacaacccgtctcagttaccatgtgagattttgtatgggttatggagattcagactcatgtcctcatgcttgctcaaaacgttctttaccctctgagtcatctttgcatctccctactgctggctttttgatagcattcatggtagaaaaggagctgtctgagcaaggaccaaaggtatgctttagaagcaaggcaatgcttcattcacaccccttgaattcctcccctcacacattaagcagataatcccatttcttgccacatagagttaactgcataggctttggcctctgtggtgcaacacactagaaagcatgtcagagtgtctttgatccattaatttctaagtccaggaaaatgcttttcaagcttctttggtgagagatcagacatgttttgaagaattgtgccttcagaattttgttgaacattttattcataagtttcaatgcagctcagcccttgttcattgcttaaataaattggtgccattacagttagtacctctccctgcccctccccttgtgttatgctttgtctgcctctcctcttgagttgggcatgaaaaatgaatttgaacatgagcggaatccattcgatgactggggcttttattgtaaataaaatcattcatttgttatgtcttgttgttttcagcagacagtgtattgatctgtggattgctattcagaatggtgcaaggagctttagcttgcacctctagcataagagggagggccatggcagagtttgtggatgctttgaatacagtgtgtaatggcggagacgaaccttgctcactggccatactgtattatacaaaccatttgtcaacagtttattgaatcagttattacatggaacagatttttccaaccagaagcatcacacacggaatgctatcaggaccaaacaatgttaggatgatgcatgggggacagccttccaaagtgtatttgtaaagaattagaggaggtaacttaaaggacatttctgctgacacattacaaactaaaagtttgctacaaagggaactgcctcagccccagcagataggagagaaaaccccgacaaatgctttttaaggcaacttttaccatttcctatgagaaatgttcacttttcttgtttcagaccagaaccatgtttgctcctgaaataaatgaaaaataataaaaaatagcttctttccttaactgtggttcacacccaatagatactatagataaaaatgcccttttagtctttccgtaaaaatcagaaatatttgtcacttcctgagtgggtttccattttgggaatttctttaattgttcaggaaactacagttattagtgatctgctgatctttcatttctcagcactgtttctttttaaaccttcctgtacaaataagatgagcacaagcactattttaatgtccttattgctaaagatagaattgtgatctttaaatcgctgcgagcacatgtctctgctctgttttgtgtgagcctctgtatattagctgccttaaatattcgtacagagatcttcgaagaagttctggtgctccttcgcccctagctgtaatgggaaagttgatagacttatggtcagttcttcttaagttggcagattcttgcatcaaacatgtgtgcttggtagtattaatgaactaggagagaattctacataaaatttcccctcttcttgggctgctaagagtgtagagccacctgctactaccatggcgctggtaagtaggaaaaggacaagcttggctgctattatgcttctcagttcactcgtacatgactttagagtctagaatgttccacagaggatcctgataagtccttttaggcaacaaaccttgtgtggcagttatttttcttatgtgttacccaagaaatgactgcatagaaaacaaatcacccttatcccaaatgccagctcaggaggtgatggagagttgataatgtcaggggtaactgagggatagcatttagggttagcaagctgcatttatcaagggtgccaggagaaaaaaaaaaaaggaattccttctttccaggcttttcctcttcaaagtttacttttggttgcattgttcttttagtgtataactgataatagattggtgacatccagtactgaaggaagtaggtatgttgtatgtgtgcaaggaaggactgaaatagaatggagaaatatgtgtgaactcctcccagaaatagtttgtctggagcatgtgcacagtggtccctggacttcacagaagaagctacggttgtatcatggatgtctcctgtccccttgctggctggttccctgtccccttgctggctggttccccatgagttgcatgtgcagatgctcgctaggactcactggctccctgttgcttgataattctgtctttctttgactgtgactacctcatgtcaggatttaccttgtaactgcagccctgaagcaaatgagacaaagggctggcctgacccggttatacatatgacgaaaatgattgaactggcttttcaataaccgggcttttagtggtactgcactaaagctcggcactgtacgaaggctatgaatcctgtttgctttcttacagcagaaagcaatacctgtacaagcaggtggttgtgtacaatgctaagggagaaagaaaagggggtgggggagcattaggaatgttttgtctcctgctcaagccaaagtacgttgataattcagatgttccaaaattgcactttgactgtttctcatgttgactgctcacacgggtatcgtgtgatgtgaaaagctcatcccatttctatttatttccacatgcagttttctcaggtagctttgaactgtcacggttaacagctgctgaacttggctcattatattccatgcatatctttgacctgctttccatgcaagccatcagattataaagaacaggaaaagcctggtcgtggtgttgccagccttacacttgtaagggagcataattaggagtaatgaatggaataatacatcactattcataagaaatgtcacataattagctcaaataatgtaaaatatattctaatttccacttggcatgaaaaatagatttgttagaacaccggtaggcagttaatgtttatctcatattttcatacacatatcaaaactgttaggttctactgagtgaatatatgtagtttgctaaaacagtcagatggctttcttctcattgagccttagtatattccttatttgttatttattatatatacataatttgtatatgtgttcaactggtataattagtgtaactaatttatatttattgcaaattaatgatctaatttatttacttagctctcatttccttcttcaagctaattgactgaaaaaataatgataaatttgtacaaacagctcttgggcaaaatcctacatgggcctcagcctaaggactctgggcagtgtgaagtaactaaactagttttttgatctgagccattttcctgggctttttgctacaggctttgaacatatctcaggagtcttggttcgggtttgtggaccccagcttgttcacattatgtttggccttagaaaggcaggttatttctgcaatgcagaggtctctaaagcattcaaaggaagatgtgagcagcacatagaggcaatctagaagtatgtcagtattttcctaatgaagtggacataccagaacattccatctcagaagaagtgtgaggactgttggcgaaagccaccagagtaccctgggatccagcgtggagcctaatcttcaacatcactgagtggtgtatagtagtggatttacttatgggtgaatacagtagacaatctctttctcccatttcagagaccatcttcccacagctcaggggagccttggctgtgtgaaggatgttaatatggaggccacctccctgccttccctttgtatagtacggatgggttgtatctataaagcacaactcagtatactatcatagctacaacaatatcataagtgggtgaattaagataatgttttgtgaccagcaatacttttctgaggtcaatgtccttcttatcactcatgagccatgagcagtttagctggaaaaatcgaggcttaagaccatcagtgtttaagccaagattctttattctcattaaatctttcccacgaactccactttccagtgttgtcctttattttttaacgtgtcctctgtcatttctacttgtcagtcatttttctgttggtgcctttattatttttatctcaattaccattatggttggttgtggaataactagacttccacaagttgtaagctgcacagactcaggcacatttgcctggctgttgccataattttttctgaggtgaaatgagtgcaggagggataggtgcatgggtgttgctaatttttctcttctctcagaggttttgaaatggctgtggttatcaagacatcatttcatcttcaggatttatttccagttcaagagttttttgggagctaagatttatctgttgaatgctaatactttaaaagtcaaccatgatgttctccttttcaccagagatgattgctttaatagttgttaaagaagatgtgtcaggataaaaataaatcagcaggaattacattcaaagcttcaccgagagcagtgcgaatgcagaatctagaaatccagttggtattgtctgttctctttgggagcaaatgtctcccagagcctttgtatagaaccatactgtcagtaatgtagttggtggatgctcagggctctgacggacattgaggaagatattctgtgcagtaaaataagcagctagcacctaagcaagacgggtgacaaaagttggagacacacattccccacttccatgatgaataacagcaaaatgagacacaactcactgagcagcactccatgcttctaaactgtgcaagggtggaattggtaagagcaaagataagtggccattatggggactgatgacattcatccttcttctgccttggagaaactatacctgttacacactagagtcatacgtggatgggagctgctctgtagatggaagctggcatcttgttccctggattgatggttctggagctcctgaatggtagatttctgtagtcctctgcatagataggcaacttggtttgggccagtttgtaatattgcttgtgtctcttttgtatagctgtgaacagggaatttgttggagggacctatcgcagttggctacgaagccctaaagagtagtgttcctggggattggtaaggggcatgaacaaaccttttctatcctatactagcctgttgtagctcttggaggcagtactcaagtgcctgtgttaagctgtctccttgttggttcctgtacagtacaatgtgtgtcaccatggatgactggttccacacacctgttcaggtatacttcagtcacctgaagtagtattctatctaattgtaatgtcttttcttaaagtgaagcacctcagtgcagtgctcagggccacagggtgctaatagggatcctctggggtgcagaagtcttcgtttggagtgcttggcttatgcttgcagcagcgtctgattctgagggcaccagctttctaaactatgtatttctctttctttaggtctcagatgaaaccgcccttatttacttattttttatcttttcttttctttttttttttcacaactcagcgtattgttagaacacttgctgagcaggagatactcagcaccacttagttgtgagagcctgaggagagcacaatcatgtctaccatgtttatcatcaggttggtggggtggctgaaatgagaatggcccctagaggctcatacatttgcttgtgagcctagtcttgaacagcggagtcatctctccaacgcaggctcatggattcgagtgtttggtcctgagtacttaaaattgtttgagaaggattaggaggtgtatcactagaaggaggctttgaggtttcaaaagactcctgcactgctcaaggtctcctgctttctcacctgcccccttgccctccctccctccttttcttcctccctcagtccttcccttcctccttcctcccccctctctgcctatgattgtggatgaagatttaatatccctgctattctttctccttgtcatcagggattctaaccctctgaaaccataagatgattaaacagtttcttttataagctatcttggtcatgatgatttatcacagcaatagaaaggtaactaagacccctgggtatccttttgtttcctatggtgtctgtatgtatgggatgtatgtaagtgtgggcgtggacatagagctcaaggacagcttcagatagccaattcttacctcctacctttgtattttgaggcaaagtctctcgttgctatgatgtgtgttccaggatagctgggccatgagcttctaggagattcttctcctgtttccaccacctgtgggttctagggagccaaactaggtaaacaggcctgaatggtgagtgctttcatacccaccaacccatctctacctgactccagttggcattctcaaccaaatctagtaactaaataacgaaccatttagctagataactgtttcaataaattatgtctttataaaagcaatctagtttttataaagtatatcactttttaggagttgcatttttttctaagtataaaactgtctactcatcacacaaagaaaaaaattataatattaaccagaaataacctgttaacatttcatattttttgcagagacataaactgattttaactcatcccattgttaatatattctactggttaattaattagttcatcattaatttttatgtatttgagtattttgtctgtctgttttttatcacttctgtgttttgtgcttttggaggacagaagaggctctcagatcccctcgaacggacttatagaccattgtaagtccctatgttggggctgagaattgaatacagaacttctggaagagcagcaagtgatcttaacccacaatccatttttcttttctggcccaacgctgctgttttaatatgtacttagaggaagtttttaaagatagcataatattataccttatgaatctaacacattattgcttctttttcaagctacatgcaatgaatgttttactattactgtatttctgataatttttaaaagtaggaatcaattacttgcttgaatgttatgagtttacactgataggcatctatatgttaactttattctggcaatacatggggatctgtatcttaaccacaccctcacacaacttcaggattcatttcttggcttcatcccaatcttggccaaaatgttacacatctcaggattttcatatgtgtcatcttattggtaaggggaaacttttacatgtatttatgacttaattttgacacatttccttttaagttccttggctatttttttctgccattttttttatttattgagacaaacctctatatgtcatatttgttgcagattttcctgttatgatcccagcttcttctgtttgcttaagccaggactgagagatagaaactttagaataaactcatcagccttttccagtgtaagttttcccaggtttttgggcttacaaagtcttcctatcctgagatccgtgaaatagtgaaatatttatgtatattttcttgtatatttttaatgattgttctttttattttctttacttttaactagactacactcaccaacaggttcatagtacttcataggcgtgttttaaaaattcactttatcatctctgcagccctttgaaggacagaacgaatgctattcctgagcttacaaatgaagaggtcacgtgtagcttatagccagacagcagcatgtttagaagagtagctatatttttgctaactgaaaacaatactacaatttattgaacatccaagtcattctttgtaatttggactttccagttttacatattctttgcatagaaatagtactgaaatatagaacactaagaatgaagtgaccaaagatgttctatacagtacaatgctatgtcagtacaatttctatgtctagtaagtgcctgataatgcattctgcagtattgttattccttggaaaagataagccctacactgtagttcctaggtagccagaccttggtgactgaagactgctctttgggaattagtaaggcacactgagtgtgttggtgccacagtaccattcgtggcactacagtttgcattggaagatgtagttactgtaaaatattattcatgtgactatgattcagtttcataaataaatgaataaccactttagatctttcttagttatcatttctataaaaaaaagtcacatggcatcacatgggtctgaccatttgcacagtgtaggggcgtacagggaagggtgtgtgtggatgccttctcctgtgtgtgctgacctctgctgtgcctctctaatctcctttttatgtgttagttttgccctattctcctactattttgcttttcattttcactcaaaggaagtgaaattcagtgtaagtttctgtatttaattcctagaagctgtcttccccacttgaacatcagccttagtacctaaggacaaaggtcccattggcctctgagaagcagggttcaagagtgtaaactttgtacttggttcttggatgggaatcacagtttacttcattgccaggagtgaactccaaggagttatgttgcttaactttccttcagttaccttcttcttatgatgaggatatatcagtctcaagggcttgttatgagcattatatgagctaatgtatggaaaatgtgtaacttgatagcgcctaaaattctagctccatttgttgaagtctatgacagttatgagaccagtagagagctcaactgattttgtgttttttttaaagttttctcttctgaaacattttcttagttaaagcctatccttccctttctagcttgtttcctttgcagagccagggctaagaaaaaaaatggatgttgtctgtcatatatgattagttcacttgggatgggtttactctgagtgtgtttgtcttctggtaagtctgtaagcactgacattaatgccgtcggccccctcctttgctgaattcccccaaccatgcgcgttcatatcccgtaaatgcatagattttccttcctccttctcttcactgtgtcaagggtcaatgtttatatactgtgccagagataggcaagatgtgttgtctatgcatggagaaggtttctagccttcttaccagctgttacccacaatgcctttctcttgaaagcatcgctctttgcaacttcatctcccacaaagattggcttacctttgggaaggacttgtttccctaactaccccactctgtactgcatgctaaaggtatccctcccaaccatacctttaacattactcctgttatggagtataactatattacacatgtttgcctgtaggacccactcctgtgtttgcctttctccctgacatcctcgggggcagctcacagctcctcctagagacttggtaacctgatgtactttatctagcctgctcataagctgttgtgtcagtggaaggctggtctttccggggcacctgctcagcagcagacatctagtatcagtgtagatggcacagggagagtcctttgtgtccgaagatcctctgagcattttgagcgttcatctcagtcctttgatacaaatttcatgtcatcttctcttcacaggcttgaaagagtcgagggttctgaattagaaaaggattctcaccttgtctattcttagttataaaacattctgactttgaaaaagtgcacatatatgcatgcgtataaatgtatgcatatggaaaatgtttccagagttaaatatatgaattttgtttatttggattaattcttttgccagtgagagtatgagctaccttacaaacacacagtatgatagatttattttgattgttagtgagaaaactggggcagaaggaaaatatctggcatagtctaaatgtagtactaaacatagtgttcaaaataacaaatgcttgaaactcacagtagtgttggaagaccctgtgccagcatcacttaccactcctggttctcctttacccctttgaccattcctactgctgctcatgcacacacacagaggttcctttttgccacagaaaccaatggtattcttccgttaacaacttcagcctgtttactgcatccaagaaagtccacgtggctgggaatggagccctgtggtgatatacttatccatttttttttttttgccagtctctagtttttatctttagcatcaggaaaaaatgaagccaacctcagtacagtaacatcatcatctttccatgctcaaatttctttaattggtttcttgcctctgtgacacaggtctattcagggtccttaaccggcatctggttgttaattcctttaatatcttttaatccataatatttcagtatctcccttggtttttcataaaattcaatcatgtgcagtttccagggcagcagttccatgccacactctgctttgttgattcatctgatggttttcctgtgattccatttaggtcaaatatttctggcaaggaaggaggatgggtgtctctgtctatatacctctgtgtcatatcagagtacattctgtcaggctgttggaaacagtcctggcaatgccaagtttgaccgcttggttaaatgatgatggccggattgcttcactgtaaacaacaggctgaaagtgttttcatttaatatgtagttgctattgtggtctgttcattatgtgtaataagaaaccaagacttaaacctcgtgtaaagatgaactaaactgatcagttgcagattctttaggcagatcaataaatatggagttgggtgggttttctgtcatgaacacattgccacgatagaggcagaatgcatgttggttcacgtgagaggaaaattgggttgattggcatgtagaaaaatgacagtctagttttgataggctgatttttagccaatgtaatctccttctgattggctgactttcagcaacaatggagtgttactactagctagctatagacagtgtcagttataaaggctccagtctgtttcaggataattcttatagccatggcttcaagatagctaatcttttccttgacttttcacaagttcaattctcaattctctccccaccccaatgctgctcctccataatttactttatcttttttttcaggactcttgcctgaggaattgtactagagagtttaaaagatgctgccttctcatccagcatccttcgaccatatgttttcctgttctgttgattctgacttctgtattccattgtcccttgaatatttatctcctggttcttctaatacacaacacacacacacacacacacacacacacacacacacacacaggttttaactcagttttttgtctctcattcagtttactcaaaaactgttcagctctgagcaataatgcattgttgatatgctattttgactatgtccaactgcagcagtgctccttcatgcaggtgttcatgtgcttttgacatgatggctttcttagtctttgagtatttttctacttcaagttcattttgttttttctcagctctccagctgaaagtagctttttctaagaatgctgctcaggtaacactatttgtagcacatcttgtgaaatagactggaaagtaagtacatataactgcatacaatgtacatgttgaattgacactggctcccttactgaaatccagaacaatctgggcccttcctcacctatacatacttcatggtcttttttattgcttatatttaccgtactatgccccagtacatggtgaacaatgttagaattacaacaccagaattctaaacttttggtcaaagatgagtggttgagtcagtgaagtgatatttaacaatatattagattgattgttccatagttgtagtttggctgtctagaagacctcagtgttatctttgtatggtgtgaagacagtgtgaaggtggcaaccacttctgtatggctcagcaacaatgcaatgtagtcattatgttaagcattgattaaaggcagggttttacgtcatctgtcacttgcaaatagaaaatgtagcaataacagattacatttcattgtatgttctcagcgctacatgagtgccataagaaaaattactagacttttataaatcacacatgaaatatgataataggaattggaagagcaaatgcattaagatcttgaatgtggatttagaccaacacagatgtgaatccaaatgcaggcatttgttacctgtttgacttttggcaatttagtcaccctatctgagcatcagtttctatgtctgtcaaagtaatgagctgaaaagacatgcaaagcaggtcctgggattcttagaggaagctgactggtaaaaggcttctgaaataatcatgattagaggaggtctttagtatcctagttgcagaaacagcagtttccttgggatttggccatggaaatgatgcacctccagccatgtgtgtgcctgtgtcacgaagaactgccaggagtccagtttccagggcagaccatctgtcagtcctggctctcttgcctggggtaggagaggtgtttattttggcagattattactacaggcaaggagtgggtacccaaaaggattgaggtgggagtgggtacccaaaaggattgaggtgggagtgggttagttattgaaccaaacacatccactctgtgtactagggagactgttagtcatgtatgtgtgtatgcgtgtctgcacatacatgtgtatagacacgtgtatgagcaataagtatttggaggtcccattttttgctatgtgagttgcagaggctgaattctggttttcaggcttggtgacaaatacctttacagcccctgttggtttttttaatgcatagaatttagcacaacaacaatttagttttatgatggccttcaaagccttttgttacccatgtgttttctccagtcctatttgtaccagatcttccacttttcatgccttgctattatgttctctgcataatcctgcaataatctatgccttctggccttcctacctccctgaaacaggttcatgtaataaagttatcagtcacatgtacctgtatatgcacctgtaagaagtattgatggaccatgttagttagtggtggtttgaatatacttggtccagggagtgacactatgaggaggtatggctatggccttgttggaggcagtgtgtcacagtgggaatgggctttgagagaccttctgcctagcttcctggaagtcattcttttcctatttgcctttagaacaaaatatagaattctcagctcctctagtgccatgtctgcctagatgctgccatgcttcctgccttcatgataactgaacttctgaacctgtaagccagccccaggtaatgaaatgttaccttttataagagttgccctggtcatgatgtctttccactgcaatagaaactctaaggaagacaatgtccttatttcttttacccacacttgtcccctgtgaggacaccagaagaactatcagggtttcccattttactcttggcattgttaactaatcagaagaacagaagattaatgataaagttggagttggttgtgtttgtaaaaatttcctgaaaataataagtaatcaactctgattgaaaaaaaaaaaaaaaaccgacaaaatggcctaattgtcttttctcaaacaaagtagagataatctgcaggaggaaggatgatgcacctcctaaccctgtgcttgtcctctcatcacagctcagtggaagttaatttagaaagtgctctctgtccatctaatagcaaagaactctggaatgctaatgcgatcctcattaggtggtagaaatcaacagagtttaccaatatttttggtcagggccatcagccatggatttcagaagctatgggattttcagagggaaaactaggaaaggggataacatttgaaatataaatagagaaaatatctaataataataaaaagaataatttcaattaaggaaaacaaaaacaaacaaacaaacaaacaaacaaaccaaaacagtttccagggctgagaagagagctcagttgatgaaatgagccaggtatggtggcgcactcctgtaatgagcagtaggaagtgctggtaggatggccacagaggcctgcctggctggtaggacggtcacagaggcctgcctggctggtaggatggtcacaggggcttgcctggctggaaactctgaatatgtgacttgtcagagaccttatgtcctaatgaggcagaggagaactaaagcagatgtgcggggtcaacctctcccctccacacacatgcatagatgcctacatatatgcctgtgtacacactcatgcccccccccccacgatataacttcccaattcattctgattacagtaaagtagtacagctgagtgagaggttgggggaggggaggttaggcctgccacatgggaagagaagggaaggaagaaaaagagaagaaagaaaggtggacctctcttgggtacaagcatctagaaatgccatttgcagttgtaatataacttgtttgaaaaataggttttggagaacagagcattgctaataatgatgtttgttgactgatgttttgggtcttttatataaggtgatgaccaccacctctggctggatgctgccttgctcagtttcactttactcacatacaagtaggaatttagggaagtaacctgtccagatttgcagtggagtccccctatagataagtttaactgcaaaatttaacaccatcatccatcattccatcaaatctatcacaaacttgaaacatccttgattgggtagttggtctggtttgcatttttttttttattgttgcctgaaagaagaaaataaataagcctcagaatttcagctggatttttttgtccccatgtattgggacatggagctcaacttcttgtatccttttcatttttcacctggctttctaaactggagcttgagacattgggctaggctaactgctgagcaacctgtctttctacactctcctctccgaggctggagttaagaccctgtgctgccatgcacaggtttctcctgagtactggggatccgaactcagatccagatactcagcaaacaggctttttgctgagataaccccttacccacctgggcttccattttatgaattctattgttttcttttctggttgtataacaacatgtatccaaacaaatggagacaataaatgcctttgggaaatttgaaggaattagaagttttgcaaaccttcagaggtgatggcaggtgcaaaatcaggctatcttgtgcccaggttgctttaggtccttctggtggtatcaattgctagctgccactttaacttccagcttcaaactcaaagatcaaaatttcttttgcagcccattgaacacattgcagttggcccttctcattagactttgcaaaattcttgtaagctaaataacaactaaattagatttccataattaagtttactgcaggacagagcagctaccaaggcatgttgctaacaggaaacttctacagcctttcacaagttagtttttaaaattaattttcttagtgcattttaatttgcaataactttccttatttgtctaatctattgatttctcacttgcggttgtatgcagctctactctggtattatatgctgtcttagaacttctcaaagcttcctgagactctttatatcaacatattatatctggtatcctttcattagctttgtcatttaatgatgtcataattagcaaatggctgggatgtgaaatacttgggttagaacaaggaggaacttgaattgccaatgttcagccacagacttaagagtggaattggtgtgagagactctgaacatggttaaataacaggaatgcttaaagacttaaagactgaaaatgcacagcatagttcacttatttactttattatttatgcgatgggttgtttatctgtgcagcaaatctagccttactctacaatataatccataatacccacatagagagtgacttattttccttcttttccaaatgtattcctttttttctacatgtatttcttatgagtagaatgaatgaaagtttaatgctgttacatttttcagttacaaaaccatgaagaaattaaaagaaaaaaacctcttaatcctgttgccaagagggaaaagtgttaatctttgaaaacgttttgttttattatagtgcaggctaaatttccatatatgatgtgctgttaattctgcttttaacagcacgggagcatttccttcccaccgaaatatattcttatattttactttcaatggtttggtaacagtacattgattttctttttgatacttaacttcacctggttttggctctttgcttctggttccatgatgcagacacgataggattgctcactctttgggaaaccacctcaactgttaggtgatacagggatgctctgcagaacacacacggtctatacatctgaatagtctaatgggaattcacacctatttggtcacatactattgaacagttttttaaaagtttatatatatatatatatatatatatatatatatatatatatatatatatacatatatatatatatatatatttatgtgtatgggtgctttgtcttcactatgtctgtgcaccaatacttgtgtatatacttggtatatacttggtatatacgtgtatacttggtgtctgaagatgcttaaagagtgcatcatatcttctggaactggtgctagtcatggtctgctgggaatcaaccttgggtcttccagaagagcagccagtgctcttaacttctgagttgtcactacaacttccttgaacagctttcaaaaagcttaccaccccattttagttgagagtgagtgaagggtcaaataaggagtctatgcaaaccctcagctaaagaaaatttggagctaacaacataattttctcattccaaattggcctagaaccattctaagcaattttatttgttgttttcaggacatttcttcttgtgtgtgtataaatgaattttatgtcacaatatacttcttaagaggaataacttaagtatacatttaagaagaatcaccatagtggatttctaagttgggaccatatttatagcagacatatcatatgtgttgttaatttggagcatataaatatgcctgtgccattaacccagggctcttttcagccatttggcttcacacaacttagttactgtcaataaatttagggtctagagttggtcctattaagagcctaccacaatgtttgttacacagtaggaatatatcaaaaaaaaaaaagataaacaataaaatgatgcctgttaatggggaatggcattactgaaagaaagttcatcaggggtgttagaaaatagggggtgttttgctttcagaacttcgtaggtctagacttaagtgtatgagaaaggtaacttaaggtcaagtaattttttcactttaattaagtgggaaataaggagtgatttgtatcccaggtgctatggtaaggggcatgcaagctgtgctgtatgtggtcatccagaacagctctttggagaagtaggtagcaccattgtccagtttcttgttcatcatattctttattcttctgagaccactgagctgcattgacttaggggcagattttgaatacctagcaatcttcctcgggctgtgtattaattgctgagaaaggtgtagttgttgctgctctcttcctgtgttctcagatctaacagcttaacttcaggaagaacaggttgtagatgtctactgagagtgacagctaccatcacttcttttcctgcctgtatgatgagagggatcaaagaaaataatttttcctgttactgaaaagttagaacagctttattgcttctttctctgaaatcttattatatgtctattcagtgagctgtcaatcacatattattgtaaactttgtatgtttgtttgtaggcacctcatctaagatgttacacacacacacacacacacacacacacacacacacacacacacacagagtggggagtgtgttttggggtttcttttgctatggtaaaacaccatcaccaaaaagaaagtagggtagaaaatgatttatatggcttaaatttccagattatagtccatcgttatagtaactctgaacaggatctcaagtgggggggggtacctgggtacagaagccatggaggattgctgcttactgactgtcttgcaatgcttgatcaaaaggctcttcatgagagtgcactacaggacagaatctatattgggcttttttgagttttgagatttggtttgccagtgcaatcaattgaaatctctttaccttagcctcaggcacactattaggacaaaggcaaaaagctacatacttcaccagaatatcagaacaatgatctttaagcatcatactataagttttcctcctctaaaacttcttgagctacatcctcatagttcaaatcacccttggcagtactgcctcctatgttcggactagaattgccattaatccccacttaaagccttcatctcattttctaattcacagtctcaaagtctgcattcttccaaataaaaacatggcctggtttatcatagcaataatgtagtccctggtaccaatttccatcttagtatggttctttaaatggtcacagaactcatgaaatgaatctctgtctctctctatgtctgtctctgtttgtctgtctgtctgtctctctctctctgtgtgtgtgtgtgtgtgtgtatctctgtgtgcatctctctctctctctctctctctctctctctctctgtatggaacttattggaataatttttaggctgcagtccaactgatccaaaaattgccaactgtgaatggaaggtccaagaatctagtaattgctcagtcccatgaggctggatgtttcagttggtcttttgtataatcaggaatcccaaagtagtaggctccagtgaatatactggcaaagtgagtgcaagcaggtgaagaatgaacaatctctttgttcttccattgtctttatataggccttcataaaaggtatggctaagagcaaatttccagggagctgaaaaatcacctaaggtattggctaaaatgtcagataggctaagtctgactttttggttctaagatttttacttagaaaattgagataagaaatagaaattagaatttctaacaaaacaaagccttctaggtaacatgtaacacacacacagaagccagattagaaaggcaatgttccagacctgaagatgtgcacacataatgcataccagttagtcatgattggaagaccttatgaaaatctgggttagttttcatcttttaatttcaaagaaatatctgtagaagagagatttgtgtaatgttattgtaacctacatagctagtacatgaattactgttcaacttttttatttatgtacccataatttatatacgataaacaatgactgcctataaaatgttatcaactaagattaagtgtgtattgaagtctggccctttgcatcaaatgttttttgagtcatccttataaatggtaatgagaaatgttttcttggggctaaacttattttccagaatagcttattcttagaagtgtgagtcagttttttgatcacaaattttacaagttttcctgtaagcacttctggctcaaagattctatttcactttgagtcagctcaacaaattggaatattacctgttatctgccaagttctatgttacttgatggggatgatgcttcaaaacagcaagtacttgtacagtatttactggagatcagatgctgttaacacacttatagtcagccagttgacccagagaatggagtgccaatctgtcacttggcaatgtagcgctacagagttttgctggaggatttcaattcacccaagtcttataaaactccattaggtttctgtccctccctaagacatagcagcttgtctgaaagaagtgaacttcttcatctaaaggagattcaggatctaagcttagcattccattctgggtatcttcaatctatcttccttccttccttccttccttccttccttccttccttccttccttccttccttcctttctttctttctttctttctttctttctttctttctttctttctttctttttttattagatattttctttatatacatttcaaatttcaaatgctatcccaaaagttccctatacccttcccgcgccctgctcccctacccacccactccagcttcttggccctggcattcccctgtactggggtatataaagtttgcaagacctaggggcctctcttctcagtgatggccgactaggccatctttggctacatatgcacctagagacaggagctctgggggtactgtttagttcatattgttattccacctatatggttgcagaccccttcagctccttgggttctttctctagcttctccattgggggccctgtgttccatcttttttttcttaattacttaaatattatatcatttctccctttccctctgcccccatcacttccatatcaattcctatgcactctgctaagagtcatactttcacttttgtgtgtcagtatcaacaacaagaggtttaatatataaatagaagccgataacctaaactatgatttagttcttaaaaaaaaaaaaaactggaagaacaagatcaagaacaaaggactacttcatacagaagagaacctttttttttttcctggtgaaatgtgatttgtggccctgataagcaaaagggagcagcctatgaaacacaattgacagagaatcctaggtaaagggaccatgagcagagacttctaggaagaaatgactttgattcttcactactgtctaaaacacacaccaatgagtgcgggatagatctgtgctacaagatagagcagtaacaggggtaagaaggaggctctctgtgtccagtgatatataccatgatgtcaatagtaagcctgaacggagacagtgggagaaaagaaaacaggagatgatcgtcatctatacaaaaaagtgtctgcagtagtgacatatgagcatctcaacatcatacctacttgctcttactatcctttctccaagcagcccaggtttggtccaggccctgtagaaagagtgcatagaaaagtgccgtcccttccagctatctggacctgatcccagagctgcttattactataaagcacttggctgtgagcgttgtgatacagtgtgttgtgtattattactgcttggttctcacagcctccatgacaattgcaagatatcctctgggatatttcagatatctgtaatacagaagtttccagaaagttttttcattaatctcagttaaatttctggctacaaccaattaagatcagggaacaactagtaagagtcacatttttccgtcttctatatgcatcccgggcttgaactccagttctctagcttgccagcagcagctttactctctgagccatcttaatagctcgagttggctattttttttaagtcaagccaaaactttgtttaaaaatgtacatttaatatatttgaagtagatgtgcatttcataggttgagtgaaatggaattcactggctttatttggaggcgtaataaaggtacgtgatattgtttaactgtttgttcaacgttggctagtgcagtggaatacaaatatttgaccttcttgacaaagattgatgggttgaagcaacacagcatgatatcattaggctgtcaaataacatcattattcatgattacaaggaattattcaggtgaaatggcaaacctattatttgtacagagagaataattgcactgtccttgtcatttcaaccccttggttgaactgacaataagatatgtgtatttattttactacagaaatctttaatagcctaatttaaataaatggaaccaattacaattagtaattgagcaaatcagatcatatacactcttcttgaaagaagttggtattctataaatctagaaagacattttcatcatttatggaatttttcatctatacagattaattttcagttttgtaaaatttcttcacaggttgaaatttgggcaaagcaatgattcatacagaaaagttgataagataccttacaattaggaaaataggataagcagtattatttctgatgacttttcatgtattgaaatgtcatctgaagttaaattccatacctgattttgtagctaaagctttattagaacacagctgtggttcatagagtatggcttatttatttgttgccctgacagggttgagggcatgtgacagagactgacatagtctgtttgcagagcctctacttaatcaaaaattatttttaagttgtgtgtgtgtgtgtgtgtgtgtgtgtgtgtgtgtgtgtacatgcaaaagtgtgtaatgggacttgaactctggtcctagatgtagagcttttactcactggtctcttaaaataatttgcaacccaacccagaaattcccaatctagagcaacgttgagactgtaaaggtcttctatgaaaagtcttctagggaaggacacagaggatatctgatgcattacctcacttctgccatgagcttctccagaaaatgtttctttcctgtccattgagttcatttactctcctgtgtctcgatatgcagcactctgactgctgcactaagggccgagcttcaccacagagggccattctttatttgtattttcttaagctactcttcatccttcgcttcttcaaatgcatttttttttatcttgtcaagttctgtgagcaaacatcttgaggtagtacttattaggaatagcatggaatacatagattgattgacacagatttcatatatcggagtggtcttaattagtgctattattgctatgatgaaccaccatgactaaagcaacttgtgaaaataggatttatttgtcttataattccatatcactgttcatcatcagaggaagttaggacaggaactcatacagggcaggagtctggaggcaggagctgacacacaaaggccatgacagaatgctaattactggcctgctcctcatggctttctctgcctgctttcttatagaacccaggaccaccagaccaatgatgtcaccacccacaatgggctggaccctcccacatcaataaccaattaagaatttgccctatacccagatttttaaaaaaaaaatgtattgtttattttatttatttacatttcaagtgttatcccccttcctgatttctcctccgcaaaccccctattccaacccttcccctccttctatgagggtgctcccccacccacacacccacccacccctacctcacctctatagcatccccctatgctgtgataccaagccttcataggaccaaggcctcccctcctagtgattccagataaggccatcctctgctacatatgcagctggagccatgggtctctccatgtgtattctttggctggtagtttagtccctgggagttctgggagtgtctgattggttgatactgttgttcttcctatgggattgcaagccccttgagcttgttcagtccttcccctaactcctccattggggtctctgtgctcagtctgatggttgactgcaagtacccacatctgtatcagtaaggctgtggcacatcctttcaggagacagctacaccacgctcctgtcagcaagtacttcttggcatcagcaatagtgtctgagtttggtggctgcatatgtgatggattctcaagtgaggcagtgtctggatggccttcccttcagtctgtactccactctttgtccctgtatttcttttagacttattgagacattttttccattgaagtttcctcctctcagataattctagttcgtgtcaagtttacataaaactagccagcacaggactcatgtagtctccttagccatgaacccaagtatagtttctgttttcaggtcttcttttatccctttattactttatgtatagacttgcattctaatgttataaaatgcccccccccctccaaagaaaactaaatggaactttgtcactggctaattagtttggaagtatttgagtgaaaccccttatgacctcataaatattaaatacaaagccccatgggaattttaaaatcattttggaaaatgaaaaaaaaaccccacattggtaaatgaggaaattagccagttttcctccaagattcctcctcttgtctctgcagttctatgtctacttctctgctgtccactgtcctttcttgggtgctggaaaaagaagctagggcctcattcatggtggataagtgctatacactaaccccttttcctcagccacatggatgttattagctggaatgttatttgaaaatgctatttggggatggaaaagtcttccaaagcagatcttgatgaagggaacccatactgtaaaaagaccaaatgcctctggattttatactttgaaatgatttagttgattgagtccattcatccaaaattagaactattaaaagtgtacttgaatatatagttttttgaagtggagagaagactttttatgatttgtctactgcctctttcagtatccgcaacaaactcataatagaaggtatgccttaattcaaatggaagtggaaatcaaaatgacttgttattaaattttttcattgatatcatttatcatcaatgacctcagttaccatataacaagacacagactatcagaatggaaaggaaacaggatccatccatctgctgcatccaagaaacacacgttaacattgagagaacatggcaattcttagtatctatacctaacacatagggacacccaagctcttaagagcaccatgactactgcttaaaacagtgggaaaggagcatctaggtaactggtcatcaagacaaaaactaaacagagagattctgcagctaactgatgttataagccaaatcaacctgacagatatttacacattacatccaaaagcaaataataaccttctcataactttatggatgaagttaaagtctctttaattgtagatatgatagtatgccttcttttttaagacttcccgcaacataggtaaccctgaaaaatccaccaggaaactcctttaaatcttaaacagtttaatcaaagtagttggatacaaagttaactaatgcaaatctttagctctcttatatacaaatgagaaatgggctaagaaagaaatcagggaaataacacttttcacaatagcctcaaataatataaagtatcttagggtaactctaatcaagaatgtgaaaaacttggatagtaaaaacatgaagccattgaaagaggaaatgaaagatgtcagaagatggaagagtttcctcatgagctcatgaattggttaaattaatatagtaaaaatgtccatcctaccgaaagaaatctacagattcaattgaaacccaatcaatatttacagatctttttctatatatttattcactttacatcctagtatcagcacccctcctaccagtattccctcatataaactctccagccattccatcttccccttcctttgagaaggggaagttccactctgggtctcacccccccccacacacacacacaactaattacctcctccacccttgactccccgcccccacccacattctcttccattgaggccagacaaagtgatccctctatttagggttgtggagtccacagacaggcagacaacatgcttaggtacagcctatactccatctgttgggggatgtgcataaagaccaagatgcccatctgctatgtatgtgtagggggcctaggtccagcatgtcctcaacttttggttaataattcagcctgcgggagcccccaaggatccaggttacttacctctgttggagtacctatactcttcaggctgctcaatccttctcccaactcaaatgtaagaatccccaacctgcatctaatatttggatgtgcgtctcaacatctctttccattggctgctgtctggaccctctcagaggacagttctgccaggttcctgtctataagaatagcagagtatcattaatagtgtcaaggaattcttacccatggtatgaggcagtcactggttagcctttccctcagtctctgctctatctttgttcctgcacatcctgtaggtaggacacattttgggtcaaaggttttctgagtgggttattgtccttatccctttactgagagtcctgcctggctataggaaaatgccacttcagggtccatatcccctactgctaggagtctcaactagagttgcccctatatatcctctggggccttgccccttcccaggtctctggcacatcctagaaattgcacagccaccaccactgattttccttctctctccctacatatgatcttcctccaacctctgctcctcactccccatctcttcccctcttccacccagttccctccttccatcaacctccaatatctattttgtttctccttctgagaaagactaaccatcctcctttgagtcctccttgttatttggtttctttgggtctgttgattattacacgtttaaaatacataaagctgtattttatggctaatgtctacttataagtgagtacatactatgcatgaccttttgagtctgagttacctcactcaggttgatattttctagttttacccatttacctgcaaaattcatgatgtctttgtttttaatggccgagtagtattctattgtataaatgaaccacaatttctttatcagttcttcagttgagggacatctaggttgttcctagtttctgagtattatgaataaagctgctgtgaacatagttgagcaagtgtccttgtgggatgatggaacatcttttggctatatgcccaggagcagtatagttgggtcttgaggtagaaattcccaggagcagtatagttgggtcttgaggtagaaattcccaatctttgaggaactgccaaattgattgccagagtgtttgtaaaactttgcatgcctaccagcagtttgggagtgtttcccttgttccacagcctcaccagcatatgctgtcctttgagtttttgatcttagtcattctgttgggtataaggtgagatctcagggtcattttgatttgcatttccctaattactaagaatgttgaacaatttctttaggtacttattggccattccagattcctctgttgggaaatctctgttaagatctgtaccccatttttaaattgggttatttaggttgctggtgcctaacctgttgagttctttatatattttggttatttccctcttcagatatagggttagtgaagatctttccccaatctgtaggctctcatttcctcaaaatcacagtgttctttgacttacagaagtttttcagttttgaggttccatttattaattcttgacattagtgcctgagccattggtgttgtgttcaggaatttgtctcctgtactgaccagttcaaggctgtttcccactttctgttctattatatttagtgtatctggttgtacattgaggtctttgatccatttggacttgagttttgtgcagggagatatatatggatctatttgcatttttctgcatgtagacattcagagaacatgccaattcttagtatctatatctggtacacaggggcacccacattcttaaaagaatcatgactactgcttaaatcatatattgactcctgagcactggagtgggaaagttcaatacctcacttttgctaaagaacatctgggtaattgatgatcaagacaaaaactaagcagagagattttgcagctgacgttataaaccgttaattaaaggtgccctctctcttccattgtatggttttagcttttgtcaaaaatcaagtatccatagatatgtgggtttatttctgggtctttaattcaattccattgatccatctgtttatttctatatcatcaccatgcagtttttattactattgctctgaagtacagcttaaactcagggacttccagaggtttatattgttcaggatagttttggctattctggtttttttgtttttccaaatgaagttgaaaattgttctttcaagatctgtaaagaattgtgttggaatttgatgggcatttcactgaacttgtagatcgcttttggtaagatggcaattttactatgttaaacctaccaatctttccattttctcatatcttcctcaatttctttctccagagacttgaagttcttgtcctacaggtctttcagttgcttggttagagttgcaccaaggtattttatattatttctggctatcacaaagggtactgtctccctaatttctttctcagcctgtttaatgcttgtgtagaggaaggctactgatttatgttagttaaatttgtgtccagtcacttggctaaagatatttattagctgtaggaattctctggtaggatttttttgggtcacttatgtatactatattatctacaaataacagttctttgacttccttctttccaatttgtatcctcttgatctttaattgtcttcttgctctagttagaagaactttaagtatattgattagatgtgggtggggtggtggtagagtgggcaaccttgtgttgtccctgattttagtggaaatgctttaaatttcgctcaatttaatttgctgttggttattggcttgttgtatgttgcctttattgtgtttaattatgcaccttctacccctgctctctccaagactttttttttatgaaggggtattggattatgttaaatgtgttttcagcatctagtgagatgatcatgtggtttttatctttcagtttgtttatatggtagactacattgatggattttcatatattgaaccacccctgtatccctggaatgaaacctaattgatcattttggatgatgtctttgaggtgttcttgaattcagtttgcaagtattttattgactgtttttgctcaatcttcataagggaaattgttctgaaattctctttctttgtttagtcattgtgtagtataggtatcagggtgactgtgacctcataaaatgcgtttggcaatgttccctctgtttctattttatgggatagtttgaggagtattggtattagctcttttttgaatgtctgagcgaaatgcatctggcagaaggcttttttgtttttgtttttgtttgttttgaaacttttagtgactgcctctatttccataagggttataggaatattcacatagttgacctgattttgatttagctttggtatgtgctatatgtatagaaagtcacccatttcatttagattttcctattttgtggagtacaggcttttgaagtgagacctaattattctttgaatttcctctgtgtctgttgttacgtgtccctcttcatttttgactttgttaatttgggtactgtctctaacttttagttagtttatttaagggtttgactatcctgttgactttctcaaagaaccagtacttggcttcattgattctttgtattattccctttgtttcaaattggttgatttgagacctgagtttgattacttcctgccatctactcctcctgggtttgtttgcttctatttttcctagagccttcagatgtgcttttaattctttagtatgaggactctctaattgctttatgagcaaatttagtgttataaactttcctcacagcacaccttccattgtgtctcataaatttgggtatgtagcgctctcatttccatcgaattctcaacagtattttatttctctctttacttcagctctgacgtggtgatcattgagtagaaagttgttcattttccatgaataagtaggctttctgttgtttctattgttgttgaagtccagctttaatgcatggtggtctgatgagatgcatggggctatttcaatcttcatctatctgttgaggcttgctttgtgactgattatatatgatcagttttgaagaaggttcatcaggtgctgagaagaaagaatattcttttgtgtttggatgaaatattccacacatatctgttagttccatttgaatcagtacctgtgtttcattatttctctgtttagtttctatcttgaagacccgtccattggtgagaaatgggtgttgaagtcttccactattaatatgtaaggttcattgtgtgatttaagctttagcaatatttcttttatgaatgtggatgcccttgcatttggggcatagatgttcagaattaagatgtttttctggcggatatttcctttgatgagtatgaagttttttccttgtctgtttttcagtcgaaagtctattctattaaatattagaattgctattcctgcttgtttcttgtgtctatttgcatggaaaatctttttccagccctttatactgagataatgaatatctttgtttctgagatgtgcttcttgtacaacagaatagcggattatgtttatgcatctgttagtctttgtctctgtgccattttactggagaattgagtccactgatgttgagagatattaatgaccaatgattattatttacttttattttgatggtgatggtgagtgagtaagtgtgtatgtgtgtgtgttcattggttttaatattgtgaatgtatttcttgtgttaaaattttcttaaattttttctcttttttattagatattatctttatttacatttcaaatgttataccctttcctaccttcctctctgaaaatcccctatcccttcccttcctccccctgctcccaacccacccgatcctggtccaggaattcacctatactggggcatagaaccttcaaaggactaagggcctctcttcccattgatgaccaactaggccattctctgctacatatgcagctagagccatgagtcccaccatgtgttttctttgattggtggtttagtcccagtgagctgtggagttactgttagttcatattgttgttcctcatatggggctgcaaaccccttcagttccttgggtactctctctttctccttcattggagtccctgtgctccatccaatggatggctgtgagcatccacttctgtattagtcaggcattggcaaagcatctcagtagacagctttatcaggctcctgtcagcaagctcttgttggcatctgtagtagtgtctgtgtttagtggttgtttatgggatggatccccaggtggggcagtctctggatggtcattccttcactctctgctccaaactttgtctccaggttgttttgatttaactccttccatgggtatcttgttccaccttctaagaaggattgaagtagacacactttgctcttccttcctgagttccatgtgttttgtaaattgtatcttgggtattctgggcctaatatccacttatcagtgagtgcatatcatgtatgttcttttgtgattgtgttacctctcttaggatgatatcctccagaccatccatttgtcgaagaatttcataaattcattgtttttaatagctaagtagtactccattgtgtaaatgtaccacattttctgtatccattcctctgttgagggacatctgggtttttttccagcttctggctgttaaaagtaaggctgctatgaacgtggtggagcatgtgtccttattacaagttggaacatcatctgggtatatgcccaggagtggtattgctggattttctggtagtactatgtccaattttctgaggaactgccaaactgatttccagagtggttgtaccagcttgcaattccaccagcaatgaagtgttcctctttccccacatcctcaccagcatctgctgtcacctgagtttttgagctcagccattctgactggtgtgaggtgaaatctcccggttgttttgatttacatttccttgttgattaagaatgttgaacattttttttaggtacttctcagtccttcggtattcctcagttgagaattctctgtacccaatttttcaacagggttatttggttttctaaaatctaacttcttgaggtctttgtatgtattggatattagcccttgatcagatttaggattggtaaagatcttttcccaatcgattgggtgctattttgtcttattgacagtgtcttttgcattacagatgctttccaattttatgaggtcccatttgtcgattcttgatcttgcagcataagccattgctgttctgttcaggaattttccccctgtgcccatatcttctaggctcttccccctttctcctctataagtttcagtctatctggttttatgttgaggtccttgatccacttacatttgaggtttgtataagaagataagaatggatcaattcgcattctactacatgctgaacccttgttgaaaattacttgttgaaaatgctgacctggagggcatcatcctgagtgaggtaacacattcacaaagaaactcacacaatatgtactcactgataagtggatattagccccaaacctaggatacagaagatataagatataatttgctaaacacatgaaactcaagaagaatgaagactgaagtgtggacactatgcccctccttagatttgggaacaaaacacccatggaaggagttacagagacaaagtttggagctgagatgaaaggatggaccatgtagagactgccatagccagggatccaccccataatcagcatccaaacgctgacaccattgcatacactagcaagattttattgaaaggacccagatgtagctgtctcttgtgagactatgccggggcctagcaaacacagaagtggatgctcacagtcagctaatggatggatcatagggctcccaatggaggagctagagaaagtagccaaggagctaaagggatctgcaaccctataggtggaacaacattatgaactaaccagtaccccggagctcttgactctagctgcatatatatcaaaagatggcctagtcggccatcactggaaagagaggcccattggacttgcaaactttatatgccccagtacaggggaacaccagggccaaaaagggggagtgggtgggcaggggagtggtggtgggtggatatgggggacttttgatatagcattggaaatgtaaatgagctaaatacctaataaaaaatggaaaaaaaaaaaaagaaaatgctgtcttctttccactggatggatttagctcctttgtcaaagatcaagggaccataggtgtgtgggttcccttctgggtcttcaattctattccattgatctactggtcagtcactgtaccagtaccatgcagcctttatcacaattgctctgtagtacagcttgaggtcagggatagtgattccaccagagattcttttattgttaagaatagtttttgctatcctaggttttttgttattccagatgaatttgcaaattgccctttctaactcattgaagaattgagctggaattttgatggggattgcattgaatctgtagattgctttttggcacattagccagttttactgtattaatcctgccaatccataagcataggagccctttccaacttctgaaatcttcttcaatttatttcttcagagacttgaagttcttatcatacagatctttcacttacttagttagagtcacaccaaagtattttatataatttgtgactattgtggacagtgttgtttccctaatttctttctcagcctgtttatcctttgtgtagagaaaggccactgatttatttgagttaatttatatccagctactgcactgaggttgtttatcaggttttggaattctctggtggaatttttagggttgcttatatatactatcatatcatctgcaaatagtgatattttgactactttctttccaatttgtatccctttgatctacttttgttgtctaattgctctggctaggacttcaagtactatattgaaataggtagggagagagtgggcagccttgcctagtccctgattttagtgggattgcttcaactttctctacatttagtttgattttggctactggattgctgtatattgcttttattttgtttaggcatgagccttgaattcacgatctttcctagatttttatcatgaatgagtgttagattttgtcaactgctttgtgagcattgaatgaggtgatcatggtttttttttgttttttttttttcccttgagtttctttatatagcagattacgttggtggatttccatatgttgaattatccctgcatccctgcgatgaagcctacttgatcagtagggatgatcatttttatgtgttcttggattcagtttgcaagaattttttgagtatttttgcattgatattcataaggaaaattggtctgaagttctctttctttgttgggtcattgtgtggtttatgtatcagagtaattgtggcttcatggaaggaattaagtaaagtaccttctctttctattttgtggaatagtttgaggactattggaattaggtgttctttgaatgtctgcactaaacctctctgcttctgggctttttttttggttgggagactataaatgactgcttctttatctggaggggatataggactctttagattgttaatctgatcctgatttaactttggtacctggtatctgtgtagaaaattgttcattttatccaggttttccagttatgttgagtatagccttttgtagtaggatctgatgatgttttggatctcctcaggttctgttgttatgtctccttttttcatttctgattttgttaattaggatactgtccatgtgttctctagttagtctggctcagggtttgtctatcttgttgattttctcaaagaattatctcctggtttggttgattctttgtatagttctttttgtttccacttggtagatttcagccctgagtttgattatttcctgccttctactcctcttgggtgaatttgcttccttttgttgtagagcttttaggtgtgttgtcaagctgctaatgtgtgctctctctagtttctttttggaggcactcagagctatgagttttcctcttaggactgctttcattgtgtcccataagtttgggtatgctgtggcttaattttcattgaactctaaaaaatctttaagttctttctttatttcttctttatcaaagttatcattgagtagagtattgttcaactttcatgtgtatgtaggctttctattttttatgttgttattaaagatcaggcttagtccgggtgatctgattggatgcatggtattatttcaatatttttgtatctgttgaggcctgttttgtgaccaatatggtcaattttgagaagatagcatgaggtgctgagaagaaggtgtatccttttgttttaggataaaatgctgtataggtatctgttaaatctatttgtttcataacttctgtttcactgtatctctgtttagtttctgtttacaggatctgtccaatgatgatagtggggtgttgaagtctcccattattattgtgtgtggtgctatgtgtataatctgctttactaaagtttctttaatgaagctggatgcccttgcatttggagcattgatgttaagtattgagagtttatcttggtagattttaactttgatgtgtatgaagtgtccctccttgtgttttttgataactttaggttcaaagtcaattttatttattattagaatgactactccagcttgtttcttcagaccatttgcttggaaaattgttttccagccttttattctgaggtagtgtctgtctttgtccctgaggtagatttcatttatgcagcaaaatgttgggtcctgtttatgtagccagtctgttaatctatgtctttttatttatgaattgagcccattgatattaagagatattaaggaaaagtaattgttgcttcctgttattttggttgttaaagttgggattctgttcatgtgactccattcttttaggttggctgaaagattattttcttgctttttctagagtgtagttcccctccttgtgttggagttttccctttattattctttgaagttctggattcatggaaagatgttctgtaaatttggttttgtcatggaataatttgttttttcatctatggtaagtgagagttttgttgggtatagtagctagggctggcatttattttctcttagggcctgtatgacatctgtccaggatcttttgggtttcatagtctctggtgagaaagctgctgtaattctaataggtctgccttatatgttacttgacctttttcccttactgcttttaatattatttctttgtgtagtgcatttggtgttttgattatgtgttgggaggaatttcttttctggtccagtttatttggagttctgtagacttcttgtatgttcatggtcatctctttctttaggtttgggaagttttcttctataattttgttgaagacatttactggccccttaaattgaaaatcttcactctcttttatacctattatccttagatttggtctttccattgtgtcctatatttcctgaatattttgagttagaatctttttgcattttgaactttctttaattgttatgtccatggtttttatggaatcttctgcacctgagattctctcttccatctcttgtattttgttggtgatggtcgcatctatggctcctgatgatttctttcctaggatttctatctgcagagttgtctccccgtgtgatttctttattgtttctccttccatttttaggtcctggatggttttgttcaattctctcatctgtttggatgtgtttccctataattctttaaggaatttttgtgtttcttctttaagggattctccctgtttacctgagttctcctggaattctttaagggatttgtttcctctttaaggccttctacatgattatcagtgttctcctgtatttctttaagggagttattaatgtccttcttaaaatcctctaccagcatcatgagacatgattttaagtctgtatcttgcttttccggtgtgttggggtatccaggattcgctgtggtgggagtactgagttttgatgttgacaactagtcttgatttcttttggtaagattcttctgtttgctttttgccatctggtaatctctagtatttgatgttcttgctgtctctggctggagcttgttcctcctttgagatctgtaagcctgtgtcagcactcctaggggaccagttctctcctggcaagcccagagcacagagggctgcggaacagccccacctccttggtgtagaggtaggcccgtaggaccctgtccgagaagctctcctgcttctgcaacctgtgttctcctgagtggatgggctttagagagacactggagagaaaatggtgatctcccctgtgtcctggggtcagtgcacactctggagacaagctatcctctggcagggcatgtgcacagagaactgagggtcagcttcaccttctggttgcagatgtaggcttgtaggaccctgtcccagaagctctgctgcttcttggcctgtgttctcctgaggtgaacatatttcttaactttagcctcattgtttggtatttttcttctagtatcatctgtagtgctgagtttgtgaaaacctttcatcatggaatatattggtttttccatctacagtgattgaaagttttactgggtatagtaatctggcttacatctgtggttccttaggatctgcaagacctctgctaggcccttctagctttttagatgaaaaatcaagtataatgttgataggtctgcctttatgttttacttggcttttttcccttgcagcttagatttaaggtcctcttcttgtgcttcagtttcattgggatatccaggggctctaggtcttgctgattgtgatcttatgctgtcctttaggcattggtgttggctagatgattctgatggcaccaagactacttgggacggtggggggagctgtggactagacaacagagtactggggatgcatgattctaagatcgtacttcttggcgtctctgcaggattacacagtgtagtaggaggctcttgggggtcttcgaaggattctcaggaacaaaaattcagtgcagagatagatagtagaactcaggggacagcacataacttaactttgcaagctgtgtcccaggcagagtgacgaggatggcagacagatccaaccgggtcataatgactttttaaatgcctgtgctgttgatttttagaaacctgagcctcatgtttggtccaataattctttatgcttctaggtaaaaatctaataattactcttagtacattaaaaaaattctgttactctaaatattttgaattttagagtcagttaatatctctatcttcaatattatctcaaatattctactctgtattcaaaattgttctaaatattgaataaaatattcaatatatatgaggtgtcaaaagtataggtatttttctttatgcccatattttcaaatgtcattttggtaatgacaataaaatagagcattaaactgaaattaatgtgatgatgttcaaggtgtgacctaattaaaatgcaaatgcaagtgtaagtacagtcctttaaaattgacactgcagctcagatactcaacagcaggaccattgcatgttgataatttgatttgacaagttcccttcacaagttcattgctttaaccccacagcataagcatatattggttcactcagtaagatgagaactgtcaaacagattcaggaagtttaagataaaatttaattagttagtatctaactgtgtttgtacatatcctctttactagagaaatttggggaataatggtagtagtttacatacacacacacacacacacacacacacgcacacgcacatacagatatacactgtgtgtgcatgtgtgtgtgtgtatgtgtgtgtgtgtgtgtgtgtgtgtgtgtgtgtgtttgtgtacacctgtctatattttaaggccaaatacaaatatttgtatttcaaatacaaaacatattgtggtcacgtttgtctatgtttatgattcttaaataattgcatgttgttttctttaccctccatggctgacttcttccagtcctctgttaatatgcacaagtttattccatgaaggtgcctcttgtcaccaactctatcagaagcaagttctttctctaacttcttgctcagtgtttctccacagcacaaatctccaaagtctgttttacagtggttttattcatgtgtgtaaatgatagctcaggaatagaatatatttctctagagcaaacttagattaaaggaagtatatttgtatctcaacaagaaatggaaggattgggaaattaattgaacgcaaattaccatttcgatacatcaaattcctctgcacagggcttgtcagacttttcatcattagccttgtgtaattccttagacaaactgaaattaccttcactctttagtgactgccatagcagtggaatgatccctaaaagcccatgtgtttacttgacattgctgggcaatggtagaactttgagagttctcctgctcaccagggatacagccctagggagtatcttagtttgagttttattgctgtgatgagacacctgactatggcaactcttatgaaggaagctatttcactggggctggcttacagttcagagccatagtcagttatcaatatagtggaaagtatttcaatatgcaggtagaaatggaaatagttaattgttctccatctggattggtaggcagcaggaagagtgaaccactaggcctgacttgaccttctgaaacttaaagcacacccacagtgacacactttcccccaacaaggctatacctactctaacaagaccacatctcctaatattaccaccccctatgagcttatgagaaccatttttatttaactctcaacaaggggatatatattaggattccagtcccatattcttccctttcaatttttggtcatgaggttataagaggcttccttctcccactgccctcttgccaagatcaaggctcactcaaagcccaaaataacaaagtctaagatcaaaaacctttgaaaacatcatccaaaatagacctctgcccttcaaaaaatgacttttctctagtctttaatgatggaaaactaacacagttgtcactacgttacacttacctgcctatttagccagggcttacaccttaggacatacttccaatatggattacactacattttccagatagccacattttctgatgactcctcataatcagtttaacttgtgtaccaagcttcctgtgctcaagtgtgagaaacacttagttattgtccttgaaagtcattaatattgcacatgctttgtgtctttattgcagtaaaagcagtgtggtttccaactttcttaaatattgttgtctcccccacatttgcatcatgtgttaaaatttaattttaggaaagaatctagtggatccatagagctgatcataagactgtctttgtttttgtttttgtttttttaaagcaatatgtcaagtagtcaatggaaataagtaagatacttgagggaatatgacatgttaattccaggaatatgtatgtctaccatgtcaacattccagcaggatactttttggagtgtaatagcttagagctaaattgtttcatataaacaaggctaaaatgtcttttgttggcaagggactagaaaaagattttaaactaactgaacgtgcaatgaaacttttagcaacccttttgcatcctagtatagacattaaagcaaatatgattagaatggaacatttggttctatttctattgtaataaattctaagaaaatcaataatagcattaggacaaaattggtaacttacccaaaaaatatttcagcacttatgttaaagctttcttatctcaaatagctgatggttataaaatgaacatgtttaaatccatgcctaaagatgattaaaatatcatacagacccaacgtactccagctgtagctgttcattaaattgaccattaataacttgtgataaaaagaatattactgcattcataaattttgtatgcagattttattaagctggcatgttatatgaattgattgtctgacatcttctggctatggccgaagataatagcatttcatgtgcattgtctataatccaagaattctgagagactgtttctagatagttattatgtttttgttctgttgggcttttctttcatctagtgaacaattaaaaagaaaaaaaaagaattgcagcttttcatatgaagcaccatgagactggttgtgtcagcatttccgttagagctcttctttctgtggagctctggattggaggaagatttggtgctagtgtgactggaacacaaaaggtttctacttccattttttaaaatataaacagactctgctttactgtctagtcttagtcaggatatatatggtttagttttcaagtctgaatttgtcaatgagtctcttaacctgttacattgtatggtgaattctgaacaaacacaactggtagcctcaacttctgacccaatacttaagtcaatggccaatgctgtgcccgtggtacattgttatccagatcttagcagactctcctaacccttgtctaaacaaacaaggacatcttttgacttaatagacttacactgttcaaccctggattgccttctacactgcaagcaacaagcgtgggttttgagtatttttaaagttacatgtagagctctaaactaaataagcactcaataaatgatagctgttcctaatgcctgagttagtagatgtgcttttaaaacattttttgaattagtatgaggagtaagaggttttctagtgatattcatatgtatccctgtcccttattctcttttattctccctcactatacactcttccagccttcccttctcccttctctctggtcccctgttcttcccccagttatcctttttcttcttccctgctgtagaaattaccagcttttgaggccactgctgatggctccctccctcatagtcagctttggatcacactacctatttctcttgagaagactggaaaggaaaggtttagctttgcccttccttaggatttgagtaccaagggaaatggtggaagtgccagggctttgctgagtcccattaagagaaagctgctaaccacagcagaggagattgtggtcaacctctagaacttggctggagacatggctcctctgtaaagagttaagccagactaggctgtcaattatctgaccaggagctaaaatcccttccccgcatttgactcacctgaagcaaagaaaaagtgatgagtatttgtacacagtggaacactgaacttaagcttcttagaagcccctcccatggggcatctgcccaccgggcttcttcattaaaggacttccactgtcacccactgttctgagttcaaaaaagtataacatttttcttctgtttcctttttccttctgatactagtcaaaagcctgagtttgctttcctgatatgctgggtttccctaccctttctctgaagcttccttgtctaaattcctccatgtaactgtctagtcctccattactgaacactctgccttctgaggctataactcaacaggcacagctttctgcctgcctcctctccccctctctcatcccagcagcagtgcagattcacagcttgcctacccctgctgttctttcaaactaataaaattgtcctggtgtggccttttgagcccattttcaaatttttttattagtgagactaagaacccaaaagggagccacagtttctgcagtaataatgtcacatgagagaaaatgagacttcaaacttagatctcatatttttcttggtactgaaagaaacatgaaatatgagtctttcctatcaaatcttatataacttgtgtttatgacaaggcactaaaaacttttatccccctactttgaaagatttttatgcaaattttgaatccctctaccctatggaacctatgtttatcctaagccctccatactacattctcaagttaaagtacctgacctttttctccattattttcttcttttaaaattaaccagtcaggaaagactgtgggtcaagcccagccaatggggaaaaaacactgtcactaagagtaaagttttgcctttcagagacactttaatttcagtagtgatctttttctttgcaaacctgaactcatttctaacagtcctaattgatacttggtagtgaataaagttgctgcctggacatttgaggctatctatgaaaatagtttgttcatgtaagaccccctatgctcagtaacaccccccccccggaccccattgagaagcagtaaaaggttagatagatacctgttctggagtatctacagttttgactttgggaaagtaagtttgaagttttaaatattttaatacatggataattgtgtcgaaaataattaaggagttcagaataaatgctaactataaaaataataaaatataatttctggaagaccgtgttggtatggtagctagtaggttttattttctgccagttctattctgttacttgccaaaatggggtgtttgtgaaatattaactgaacacctagagttgtctttgtaaatatacacaagtaagactctatagagccaggtctgaggctggaagagtgccatgagtaaggctccttagtgctgggcctccctagagtgcaatggagcttttcttggtgtgattaactgagtgcaggaggagttggggtcacagaaatgtgatggctatcaatgccaagtcagggttttctgatttccttatctcaaggccaaaacaagacagggaactcactggaaagtagagcaagatttgttaaggaagtgagaaggaaatctgccctgtgggaagacctgcaaaatcagtggagctccactctgcttccctgattgctgtctttgttttctcttggatggagactgcagtagtcactattgtgattcttcatcattgagtagattgtagtctaagatggtaaaggagttcatgaaccctatgtgaacactcagcccaaagagagttttcattcattcattcattcattcattcattcatcctcatgagctctgtgactagctcatgatccacagcaggcactgtccttaatgcccaggtaaaccagctcttgactcaccaggtgctatttacctaactgttgggagaatgttgctttttcctgatgatttgacttagtgttttagagtttgcagttattacacattttggttaaaggtgacaatgttagaggatcttcttgaagggttgattcgtacctttgtttaatgtttgagggacactgagttccagctagtgtattgctcagagtaatggaaacccccagcagatactttggtgtagagtatcctgtttcctacctgggaaacttgaaatgcaaggtattccttatgatctctagccatctgtgactatagccatctttttggctatgaaaataggttcaggtcctcatgccaaaactggggaacaaaattagggtatgcctaatgaaaattaggcatagagtcttggaaattagcgtattgaatatttcttttgcaataatagtttaaaactctgttatgctaatttagatctgtgcagcatctttatctagagcaggcagatgttctagtgagtgtctcagtgagcagctggatggaaaagcaggtgtgggtgattagtggaatgggtacagattattctagttaatgtatgtggggtcagtgctatacacagtacctgccaaagggtatagcatagacttttgaaaactccagtttgatcttagtctgattaaatgtgttcttcaaactaaagacagtggtaaaaagatttagtatatcctccaagaaactggatggtattataaggcagggtttttgtttgtttggtttggggttggtttgtttgttttgtttgacaattttctaatgagctgtgtgatttctgcactttggaatggaatttcttatctaccttggtgagcttcaagttgaacttggttttcctaggtagtgctgatgccttggtcaatgaggtcaagtgtatatgtccttttaagctagaccactgcccttggttttggaaggggaaagaattaatagtatttgcttaaagttaaagtattatttctgtaccatttattacttattataaattgtgagaagacatttttctctctaattcccctccctgctgctcatgctcactcttataaattccatcctagtagatgcttggcccagcatgtaaatcctctctcagtggaacataaaaaccagaagaaatgcatcaaaactgaagtagaccagcaaaagtggagagaagttttagtgcagttattcagactatctcagccaagtatctacaggtccatgttctggacttttttttttttttttaaatcttgattttccttctgaaagagttaactattatttagtctttacagtcaacataatgatgatcatatatacagttgcagtgtttctagagttaggggcagagcttgtaccttttgctactctaacaagccagcctttgttaattggcctaagtaagccaattaaggagtaaaattcatagtagaaagcagaaagccaagatttcttttccaatgtggccacagagtggaaaagcaccaagatctagttattccccagttctgtcaatgtgggctctaactggagagtaggatttaaaatgatcaagctgtcctgctgggttatgggtacccactcactagtatctctactctccactgcagggtcatctgataagttgtaaatctttccctgaagatgaaaacaggagataaaatatgttggggctatataggaataagggtctcaatttctgtccttgactagaagctgctacgtttttggttgtgtctggaccaatgccacaagtgtcagggggtttgggtactctactttcagctataactttatttactacaattaatttttactctttgagatgggtttctctgggtagtcctgactgtcctggaacttgctctgtagaccaagatagccttgaacttagagaaagctgcttacctctgtcttcagagtactgagattaaaggtgtgcatcaccacatttcaactcatctgaatctttggactcatttgccgtcttaattttaatttcctcttatatactcagattctgagtatatactcttaagaactcagatggttttgctgctgtctaactctccgtctgggtcttctggattgtctgtccaatgggtgaaattcaatgatagttgagaccctaaaccattttacacctcctttccactctacctactaagttagtttacagtcttacttctgggggaaaataccataggcattaaccggcttaaaagtcattgatgactaacttgactgtgaactggccttcatggtcagccttggccctgactcatagtcccctcataacattagaaaggtaagcagcatatttaattctcctttgacttaaatatacatacagaaaaaggaagatgccagagtttggttgggactcattaagagacaactacttcctcctgattaaaagatgaaatctgacttttaacctatggccctgggtggaaaggtggcatttctttctgcttcaaagcttagaacagcacatgctattgtcacctcccttaaaagttagtccaggtaggtctgccaaacacctgtccaggagacaacattctcttccacccaatctaagtcacttgaaaatgggaggaatagttatccctttaatgagaaaatgtatttaccctttctagaaaacttggactgccccacctggggatccatcccataaacaaccaccaaaaacagacactattgcatatgccaacaagattttgctgacaggaccctgagatagctgtctcctgtgaggctatgccagtgcctgacaaatacagaagtggatgctcatagtcatctattggatggatcacagtgtcctcaatgaaggagctagagaaattacccaaggagctgaaggggtctgcaaccctatagaaggaacaaaaatatgaactaaccagtacccccagagctcatgtctctagctgcatatgtagcagaggatggcctagttggccatcaatgagaggagaggcccttggtcttgcaaagattatatgccccagtataggtgaatgccagggacaggaagcaggagtggatgagttggggagcacggggaggggggagggtatagaggattttcagagaggaaactaggaaaggggatagcatttgaaatgtaaatgaagaaaatatctaataaaagaaaaagagaaacctctgctgcatttctgccttcctaatttctgagcctctcacatgttacatgcagaattgcagcctcagcctcaccccttttctgagttagaacctttcttttttccttacatttttgtttcttttcttttctccccctcttcctttttttttggacactggctgagaatctaagcattctttcccggaaattctgggaaaatcccaaccccttcttctatagctgcctatagacctccatgcaaaacatgcctgctttcttggggcctagatcaaaaaggcaagatgttttttcttcctctgatcccccccccccccagctgcattaaagcttgcctaccctattgtttttcttgaaaatgctaataaaattgccctggagcacctgtctcagtcttctttgaagttcttttattaactagactaagaacccagaaaatgagctttgaatcaggttgttacctgccccttcaccttccctgtataccagagaaatgaattttaaaaattagaatgaaaagtcaatgacagccactactatttagattctgccacccatttaccaaattcccccatccccaacatgctattctgtggctgtcttatgctatatagaaaactattccacaaacctaaatccaactataagaaaatatattcctttcccggagaaggaaatttccaggtctgacaggattcttgaccccaggtgaattcacctagattagatgtgggacaggactgatttgtataccttttctttggagttcagctttaaattcctgcatgcctgtaaaatactaaattttgcaagtagtgggtaaacaaacacagtagaatggcagctgaagaaagagacactatgtctgtcttcagaattaaaatgtcccctgatgccatccaggacttttagcgtgagaacctcggtacacctctctaacctgactatctttatctgtactgactgcttcttgagtactaccaggacctgcaacacagctcagttggttaagatgcttatgtctaaggacccaagttcagtcaacttgcttggtgtaagtagaaaaaccatatctagcatattattcactgactttaacacacaaactgtggcctgtgtaccaaacagtcaactgatcgatcaattaattagtcaattaatgattaaatataacttttgtagtggtttaagtagttttagctcatatagattcttgtatttcaatgcttggcccacaaaaagtaacactattaggtggggtgtccttgttagaggaagtgtgtcactgtgggggtgggctttgatgtctatgctaaggtttcacccaaagcagaagagagagacactcttccttgctcccttcagatcaagatgtagaagtctcaactctttctctagtgaaggaccctaaatgcttttgccaatcttacagtcccttacagcttccccctccaacctagagtcaaggttaggacaagttccagtctccacccacaggaacattcttgagtaaaccattctccaaaaaaaatggagaatatactgacttgatagtcacctgaccctggaaaatcccacttagagttcaaatgcgtgtcatgatctgcccatgcttgctaggcaatagatttaaaggtcaatatgcttagccaataagttttaactgtaaccttgctgatgtaaactgtgaccctaaaaagtataaaaactacttgtaatagccattcagggctgccttctagtcactcatcttgaaggactaattgaaggtcgaccccgacatcctggaaaaataaacctcttgcttttgcatggatctgcatcttggtgtctcactgggggcatcacaatgtaagtaccactgacctattgtcagggtcttacactagcaccatatctgaatagatcgtctcatgcttcctgccatgatgataatggaatgaacctctgaaactgtaagccaaccccagttaattggtttcctttgtaaatatctccttggccatggtacctcttcccagcaatggaaagataactttttacaggttaaaacaatgtaaacaaacataagccgggcagggcatatagcagtgctgcagtatctggatccttgctatgaagacagcaggggctgtaatcagtaaatacatgggatggaccacgcatcttaaatacatctcagcgtcatcacaggaattctgcagttgttcagccactctagttgcctgatcaccttagaaaggttcatatgtcaggcaaagaaagcgtctccttatgtaactaggctgcctggcaggaaggaagacatgatcctgagcttcttgtccactgccaccttccacccccagaacagcgagccccaagaaattagaatttttccaggaatctcttgctggcagaaggaaaggctgagactctggggcagcctgtagaggagcttgtctcctgaagaatgccttagagcttgttaggttgccctactggtgagactgactttgcagaaagactagggtggagattgtggtgactgcaggccacaccttgacctgcctgcttagttacacttagatataccttacctgcatgctaggacacaactgatgaactcttctacttttcactattcatttgagtcttttaattgtcttattactaggagctgatgttggcctgttatagctaccagagcacaggtctgaccataactggggtagcactcaactttatcatccaagtgtctcagcttgtctcagcaagctttctgttttggcttcattatcattagaatattttgcaaaagattcacagaatgttggcttctcaggcagtcttgcaaacacttgaagaagaaaaaaaagggtcctttaatacttggcatttttaaactggtatttaggatgttcatccaaaatctatttgctttggctggcaaagtggattttctggataatgaacttgaactttgttacctgcttatgtctttgaggtagcagaaaacgaggaggctgaatcgggagcaaagactgctgtgcaagcagcttggcattaaagacttcatcatctttgagttgtgagcgatttggcctccagcacttactgctttgtactgtaaaatgtgatgatgaagtgttcagagtcgaagataggctccttcctcagtgttggcaagccttagattgccaagcaccacaggaaaccacaggcattgggtaattgagagggaagctcaagacagattactttcagcctgtggaagttctcataactctatctattaattgctacaaataagatctgtgttttcttcagaggatcttaagagaaggtgagatcagcagtgagcctgccagatgctttcaagtggaacctaacagcattctctcaagtgttggttttattagtggatcccctacatagaaaaatatttttccagctagtgtttctgactctcagcagtaattaaacataaaaatgaagaatggtagaattgcaagagccatccagagtcaattgctggacctaccttaagtagctcccagagcggtttgctctgatctccctgcttatacctcccttgtgggcagggcaggctcaaacttctattctcacatgctagggcaggctgtggtgagagcatggctctcactggctttgccagcctggctaatctatctctctctctctctctctctctctctctctctctctctctctctctctctctctctctctctctaagaaggcttaataagatgaagccaaaaactatgaagtgaggatttggcatgggcatttcttagcaggtatcagcttgtatttattgtacccatcatggatgtggcttcctaggggagccagcctgcttgtgattgggttatctatggaaatcatgtgactttgtgtaaattagtaactgaaaattttacaatattgaaaatctgtgtttgtactttatgctgattctattggagagagcaaaagggcagtggttttaattaaagcacatttgtatgagtttgtttaaagacttttctttttaattaaatgaatacagacagggcctgggaatgtagctctgttggttgagtggttgcatagcatataagaggccctggtttgattcccagcactgtatgaactgaatgtctttatattggtttgtaatctcaacactggaatgtagtgtcaagaggatcagaaggccaaggttataaatttgtgggcatcttgttgagagaacttgtctcaaaaacaaaatgagacaaaaggaacaaaattattagaaattgaatttaaacttacaattcaggtagaagttttttataattctagctaatattgttgatttttatcattgataattttttactttttaaagggtgttttgtattgtcatattgttaatttagcttttttcgttttttttctagaggtttaactgtaagtcttttctttggagagagacaggacagaaaattttaagatgaaattgcgcaatgtctacaagcttatcccaaatctataaatgaggaagaaggtgagaatagctagtgcaaggctgaccgggctttgcacaagtgtttacttttgcagagtaatgggtgcaccaagattcattttatttatctgtttctgttatctgcttgaaattctctataatacagtttaaaaacatacaaactcagcaagagagtttcaaagttcagtcctcgttgctagctatagacaatctttacagtgaacttcttcatatcagctatgactacttagccatgactgattgcattgttaaattcaccggtggcaaagagtagagtatatgctcgatatgagagaagattcccatctgcaagttgtctcagaatatgtttgcatccaaattcatttgtggaaggctgctcccttgaaggctaaaaaaatgcacaatatttcttttgagatacgggaagcattttgtgtcttgtttattgcaagcacatctttgaagccaaagggggggattatatgtgaaattgttgatttactatcctcccgaatattcctttaataatgaatggaggagccatcagagcttgcccctttctagcctatagagttttagttgtcagtggcacagcagatcctctctctgctttctttgcctcaccagtcaagctctgctggggatccttgagtttgctgatggattctaacctgcctgataaatgttcagtgttaggcagttatgggttcttatccaagagactatggttgtctgcactgtataatatatgttctatgtcaatggagctctgactccctgggaccttatgattggattaaggtcttttgtgtgtgaaaaataaacaaattccatgtgacgtggctagatattttctatgttttaatgaaaaataaaacttcttgttggaaataccagcttgatccacccattttatgtactctctcatgttaagtcttttgcaaatatttgcataccttctaccacgcttgagaaatcgtgctttttccggtgcctattaagccttgacagcatatattagtttataaagacaggtgttgtgaggatgctgtttgataatcagtgcccagaaatgtcctatactctgctggatcataataatcaagaaaaccttagacaagtaaccacccatatgaaactgttctttggaattagtctgtcctgatctatggattcctgggtttgcaaagaatttcaaggtctttggttctgagaatttgtccattttaaatatttatttacccattttctctctcctagctggcctcactcttgaattttgtttttgtttgtttgtttattttagcagcgaatgcccacatcttaaaatactaggcatgatgattttctctgaggatactgtatgggacactgaaataaaaaaaaaaaaatctttgcaagtgcttttatgcagtgatgcattgtgctgtaactttgatgtcagttaagggacaaagtcatatttcctttctacattggagaatcaataatgtggtcatacttgcagagacaggcatgtctgaaccacgggcaggcagtacattattttcaaatctcttttttcccaaaggtccctcaagtttagtcctctttgacagtttcattgtgaatgttctacagccttgctgtcctgagttaccttaggaaagttccatggaaaacagtataattaatacagtgccttttaccaggtcccatctgtaactctccaaacaatagttatattgctttgttcttcaatagcatactccttcgcatgtggctttgatttgatatgctgtgcagtgagatgccctctgcatcattgggaattttcagtgtctgttatgaatagtttccatacaccttcaacatactgtgttgtttaatatattctcttcctttatccatacctgccccaaaaggcagtgcaccttgtaaaaaagaaaatgcaatacaactggaggtgtgtgatgtattttaataaataatggataattatatattatcataacgtataatatgataattatatattatcataatatataatatgatacaaagctcaaaaagagatggttttaatatacattctttgtagtcgtagcaagcattgtcaccattaccaccactactaccaccaccatcatcatcatcattatcataactgacaccatcttcatcttcctccttggtcttccaataattttggctatactaagtatattattctgtttacacaggacactttctgcaggagcccctagtttgaaggtgatagagtcatatcaaaacctgaccttttaagtacacaaggcagactgtcatttgctatactcacttatccttaagtgtattcttctctaggattattctctaatatactggccaaggcaagacttggtcatttaattggaaggaccttggcagtctgacttccagggggttacttactggtttccactcttgggaactctgtctcttctcttcctgtgtatgtgggcacgctgagacttgcttgtcagaaagattagatgatgaagcaagcggcccatccagtgccaagcacatcgtgtgcctgtgctgattcctctcctattgctctaactcttcttaatatttctaccacgaagactataggtaactgcctactagtcaacaaagaatctccatgcttcactagctcgccattgtctactttctacggtgggaaaaacagaaaccaaaccccaccaaaaggattcacctttcactcagcactgctctctaatcttgttaggccagtttaggtactgagttgatcattaaattaattgtgagctttgtgccccccaagacaggaatatacaggctctttatttgattcctcaagcattccatgcaaactacgtgtatctatattacttagaataaaatagctcagccagaaaattaatcatgtacagtttttagtagtttaggtctaaaatgcaaacatttacttgaaactctttagcagtggattgtatggaaatctatagccattactacatgctatggctagtgtgatactcagtaggatgacttgtattcagtatgcaggagctagtaatactgatggtaaagaacacttattggaatgctgattacaatcagaaattcagtgacaaatttaaaaccggagatctccctcttgaatatgtcttcaaagaaaatcaggagctaacaaagaaaacaacaaatcaataacttattctcttattagcctccagttggcacagctagccaattttatgtttttcttgtatttggaaataggtataaaaatatttctaagacagtctgtcaaaaggaaagcaaaacaaaaattctgaccaatgaaagtgcattcaaagaaccaaaaaaacaaaacaaaacaaaacaaaaaccccaaacaaacaaacaacaacaacaaagaaaaaacaaaccaaacaaacaaagaacaaccctgagcaattttgctgtggcagctgctaggaggtctgctgtgtcaagacgaaactgaatatttccttcccagctaccacttgtcagaaactcattgaagcatctggtggttacattgaagtttctctaatttctatgagaagcacactgctacagaagcagttcctgatgctttgggtgaataatagatgggtaatatggtcctaatcagtgatgggaatgataaacaatgttttcccatgtggcaaagtgttttctcacaaggcaagttgtgtctgctgctgagcaagggaccttcttgttctaaagcaaggagaactggacgaaggaagcacgaatctgttcagggatgcaatctagatgtcaatgagtattttttaaaatattttttattaagtattttcttcatttatatttcaaaggctaacccaaaagtcctccatatcccccccactcccctaccccccccactcccacttcttggccctggcattcccctgtactggggcatataaagtttgcaagaccaaggggcctctcttcccaatgatggccgactaggccatcttctgctacgtatgcagttagagacacgagctctgggtgtactggttagttcatattgttgttccacctgtagggttgcagatccctttagctccttgggtacattctctagctcctccattgggggccctgtgttccatccaatagctgactgtgagcatccacttctgtgtttgccaggcactggcatagcctcacaagagacaactatatcagggtcctttcagcaagatctttgtggcatatgcgttggtgtctgagtttggaggctgattatgggatggatcgctcggtatggcagtctctatatggtccatcctttcctctcagctccaaactttgtctctgtaactccttccgttggtgttttcttcccaattttaagaagtggcaaagtgaccacactttgatcttcattcttcttgagtttcatgtgttttgcaacttgttacttgggtattttaaggctctgggctaatatccacttattggggagtacatatcatgtgacttcttttgtgattgggttacctcactctggatgataccctccaggtccatccatttgcctaggaatttcataaattcattctttttaatagctgagtagtactccattgtgtacatgtaccacattttctgtatccattcctctgttgagagacatctggttctttccagcttatggctattataaataaggctgttatgaacatagtggagcatgtgtccttattaccagttgcaacatcttctggatatatgcccaggagaggtattgctggattctccattgtactgtgtccaattttctgaggaactgccagactgatttccagagtgattgtacaaacttgcaatcccaccatcaatggaggagtgtggctctttctccaattcctctccaggatctgctgtcacctgaatttttgatcttagccattgtgactggtttgaggtggaatgtcagagttgttttgattttcatttccctgatgtttaaggatgctgaacattttttcaggtgcttctcagccattcagtatccctcaggtgagaattctttgtttagcgctgagccccattttttaatggggttatttaattttctgaaatccaccttcttgagttcattatatatattggatattaatcccctatctgatttaggattggtaaagatcctttcccaatctgttagtggcctttttgtcttatttacagtgtcttttgccttacagaagctttgaaattttatgaggtcccatttgtcgattctcgatcttacagcacaagccattgctgttctgttcaggaatttttcccctgtgcccatatcttcaaggcttttccccactttctcctctataagtttcagtatctcttgttttatgtggagttctttgatccacgtagatttgaccttagtacaaggagataagtatggatctattcgtcatcttctacatgataactgccagttgtgccagcatcatttgttgaaaatgctgtctttttttccaacaaaggatggttttatttcccttgtcaaagatcaaatgaccataggtgtgtgggttcatttctgggtcttcagttctgttccattggtctacttgtctgtcgctataccagtaccatgcagtttttatcacaattgctttgtagtacagctttaggtcaggcatggtgattctaccagaggttcttttatcattgagaagagtttttcctatcctaggttttttgatattacagatgaatttgcaaattgccctttctaatttgttgaaaaattgagttggaattttgatggggattgcattgaatctgtagattgcttttggcaagatagccatttttactataatgatcctgcccatccatgagcaagggagatctttccatcttctgagatcttctttaatttctttcttcagagactaaaagttctatcatgcagatcttttacttcatttagtgtcacaccaaggtattttatattatttgtgactattgtgaaggatgttgtttccctaatttctttctcagcctgtttattctttgtgtagagaaacgccattgacttgtttgagttaattttatatccagctacttcactgtagctgtttatcaggtttgggagttcactggttcactggaatttttagggtcaattctatatactatcatatcatctgcaaatagtgatattttgacttcttcctttccaatttgtatccccctgatctccttttgttgtcaaattcctctggctaggacttcaagtactgtattgaataggtagggagaaagtgggcagccttgtctagtccctgattttagtgggattgcttccagcttctcaccatttaatttgatgttggctactggtttgctgtatgttgcttttattatgtttaggtatgggtcttgaattcttgatcttttcaagacttttatcatgaatgggtgttggattttgtcaaatgctttctcagcatctatcaagatgatcatgtggtatttttctttgagtttgtttatatagtggattacgttgatggatttccatatattaaaccatatctgcatccctggaatgaaacctacttggtcaggttggatgactgttttgttgtgttctttgattcggttagcaagaattttattgattatttttgcatcaatattcataagggaaattggtctgaagttctctatctttgttggatctttctgtggtttaggtatcagagtaattgtggcttcatagaatgaattgggtagtgtagcttctgtttctattatgtaaaatactttgtgaagaacaggaattagatcttctttgaaggtctgatagaactctgcactaatcccatctggttctgggctttttttggttgggagactattaatgacagcttctacttctttaggggatatagggctgtttaggtcattaatctgatcctgatttaacttttgtatctggtatctgcctagaaacgtgtccatttcatccaggttctccagttttgttgagtatagctttttgtagaagcatctgatggtgttttggattttttcaggatctgttgttatgtctcccttttcatttctgattttgttaattaggattttgtccctgtgccctctagtgcatctggctaagggtttatctaccttgttgattttctcaaagaactagctcctcatttggttgattctttgaatagttcttcttgtttccacttggttgattttgcccctgagtttgattatttcctgccatctactcctcttgggtgaatttgcttttttgttctagagcttttaggtgtgttgtcaagctgctagtgtgtgctctctctagtttctttttagaggcactcatagctatgagttttcctcttagaaatgcttccaatgtgtcccataagtttgggtatgttgtggcttcattttcattaaactctaaaaagtctttaatttctttctttactccttccttgaccaatgtatcattgagaagagtgttgttcagtttccacgtgattgttggctttctattatttatgttgttattgaagatcagccttagtccatcgtgatctgattggatgcatgggacaatttcaataattttgtatctgttgagacctgttttgtgaccaattatatggtcaattttggagaaggtaccatgaggtgctgagaagaaggtatatccttttgttttaggataaaatgttccgtagatatctgttaaatccatttgtttcataacttctgttagtttcactgtgtctctgtttagtttctgtttccacgatctgtctattgatgaaagtggtgtgttgaagtctcccactattattgtgtgaggtgtaatgtgtgctttgaggtttacaaaagtttctttaatgaatgtggctgccctagcttgtggagcatagatattcagaattgagagttcctcttggaagattttacctttggtgtgtatgaagtgcccctccttgcctttttgataactttgggttgaaagtcaattttattcgacattagattggctactccagcttgtttctttagactgtttgcttggaaaattgtttttcagcctttcactctgaggtaatgtctgtgtttttccctgagttgggtttcctgtaagcagcaaaatgttgggtcctgtttgtgtatccagtccattagtctatgtctttttgctggggaattgagtccattgatattgagatattaaggaaaagtaactgttgcttcctattatttttgttgttagagttggcattttgttcttgtggctgtcgtcttttaggtttgttgaaggattactttttttctttacctagggcatagttttcatccttgtattagttttttttctgttattatcctttgaagggctggattcttggaaagatattgtgtggatttggttttgtcatggaatactttggtttatccctctatggtaattgagaatttagctaggtatagtagcctgggctggcatttgtgtcctcttagtgtctgtttaacatctgtccaggatcttctggctttcatagtctctggtgagaagtctggagtaattctaataggcctgcctttatatgttacttgacctttttcccttgctgctcttaatattttgcctttatttagtgcatttgttgttctgattattatgtgttgggaggaatttcttttctggtccaggctatttggagttctgtaggcttcttgtatgttcatggacatcctttctttaggtttggggagttttcttctataattttgttgaagatatttgctggccctttaagttgaaaatccttattctcatctactcctattatccctaggtgtggtcttctcattgtgtcctggaattcctggatgttttgagttaggatctttttgcattttgtattttcttttgttgttgtgtccatattccctatggaatcttctgcacctgagattctctctttcatctcttgtatgctgttgctgatgctcttattgatttctttcctagggtttcaatctccagagttatctctctttgggttttcttaattgtttttatttccctttttagatcctggatggatttgttcaattccaactcctgtttggtaatgttttcctgtaactctctaaggcagttttttgtttcctctttaaaggcatctaggtgttcatctgtattttcctgtatttccttcttaaggtcctccatcattatcataagaaatgactttagatccatgtcttgcttttttcgtgtgatggtgtatccaggacttgttatggtgggagaatttggttctgatgatgccacataaccttggtttctgttgcttctgttcttatgcttgcctcctgccatctgtttatctcaagtatttgctgtcctcaatatatcttattggagcctgtcttttctataaccccagttgattcagtactcctcagagtccagctttctctgtgatcctttgcttatgggctcctgtgaacctgagattctggtgtgtcagagttcttggcagtcaagttcctctgagaccctgaaatagtggtgagaccaagctccttttatcctgggatcctgttgtcaaagatcctgggcatgttacagtgcctggaagtggtgtctcctttgaggaacatggggctgtctggtcagtggtcctaagatcttgtggagagtcctctagggactgtgggggtgtctgctaactctgcacacaaggtgaccaggtactggcgccaatcagaagggacttggtgaccctgattaggctgggttttctgcttccctaatgctgtctcaggtcctgtgcgattggattggaacagaagttgtgttccactcaccagtgttcctaagatcgtgtggagagtcctctagggaccttggggtgtccgccaactccgcgcccccaatgagtattcttaaagttgttgctgtaaacaaaaaagagaaggagattcttggactgacagatactgtacctcagctgttgaggcccaaggcagcaagcagagtcagagcttctacttctgagtctgagtccaataaaaatatgtctttaagagtcatgagtgagtgatcagacctggaaacaatatcaaatgtcttctaaaatcttcaaatattggaattttttttctctgaccaactttttgattgccttctctattagttacttttctgtttattaactttggcaaaccatgaccaaggcaactaaaaggaaagcacttaaaggtttcgatgagttagagttcatgatggtggagtaaaggcatggcagcaggaatagttgacagctcacagtttgttctcaggcagaaggaagagaaagtacactggtggtggcagggattttttgatactgtgaagcctactttcagtcacatggtgttttccaataggatcacacatcctcatcctcaaacagttctaccagctggggaccaagtattcaaatttattagcctatcaggtcaattgcattcaaaccaccacacctacaaacttcttccttttctaagaaaagcataaatgagatcagttgagataccaaattatttactaaaaatttctaaaatgtatatatattagcatcatatataaaatactgaagtttatagaaataattctgtctttgttattattctattgctgtgaagaggcaccttgaccatggcaactcttataaaagaaagcatttaattgggactggctttcaaaatcttaaatttattccattattattcaggtggaaatcattgtgacaaacctgcagaactggtgctggagaagtagctaacatctgactgttggcagcagaaaaaagagaaagctactgggcctggcttttgaaaccccacagccacccctagtgacacacttccttttctaaggccatacctttgccaaccaggacacacctcttaatccttctcaagtagtgcctctccctgatgactaagcatgcaaatatttgagcctaaagggtctactcttatccaaacttacatagataatatgtaatcctaatatatattatatggtaattgtgatagagacattatggtagatactggttgctgaaaaaattcacccattaccagtatagaaagaaagggcaagtatacttaatagctctatgtcatcttgataatgtcatctgagaggagggaacctcaatttaagaaatgccttcataatagggctgtaggtaagcctataggaaattttcttaaatattgatggagaatctggaccacagtacagtgtattataggtgggtctacccctaggctgtggtcaagagttctgtaagaaagcaggctgggaagctatggcaaggaagccagtaagcagcattgctccatggtctctgcatcacttcctgcctctaggttcctgccctccttgggttcctgtcttgtcaacattttggttgtggtgtttcatcacagaaatattaaccgtaacaaagacagccaaccttattaaaaacattacatagagaatggtgggtattgccataatggaagggactccaagcaatgtgcttgaacaaagtgtctccattttaataaaatcttccttcagttacagtgaactactttacatgtaatttctatgggataaaatttctaccatcaagtgagagcaggtctgtgatctgtttgaggccattttttactgactatatacttttgatatactgttgttccagcattggccagaagagatctgagttttttctgtttgggggacaactttgagaccaggattatattaggggcctgttccttttcttgtctttaaatcacagccttctgtccatgttaacctgagcccagtgattttggtaaagggctgtaagttgagacatctctgctgaacgtgttaaagcccaacagtaacttgagcatgctcagcactcagaggctgaggcaggaagatgtgagctcaaggccagcctggattcctttataagactctgtgtgggaacaaaggaagagagaaaaggaggagggaaagaaagaaggaaagaagggagagagagaggaagagagaggaggaggaggagaaggaggagggggggatgacaacaatgagagaagcatggactatcagaaggaagacaagcagagaggcagtcaagctcacactatttttgttctgagaatgactggtcaagagtcactcttctccatgacttcgatgagacaccacaccctgtttatatattttttagctcagaagtaaaccttccacattcccattttatgcattgtaaataaccacatggactattttgtacccactgatcaactgtctgcccagacttaaatttcacagactttccttgactcttcctctgaaaccttggctaaaaccacctgagtgcagaacagcctatctgtagacgcccttcttaaaattagctgatctcagggtaaaacaggctacttgctcattccacatttccattccaattcttgctagtcttgtctgcttctccctagaaaagaaaattcctttccatctgaccttggagacatgtataaatctcaaagtcagagctgtctccagatggcaatagtctctttcctcctttcacagtcttcccttcaaatagcatctctcttaatactgatttataggtatttgacatttgcatttcatcctttgagtttggaactgttgcctacttttgtgtttgaagcaccttcatggtagcataatcagcgttccctgtgttgttggctttctccttagtcatatggataccttagctctattttcctgtctcctacagaaggagtgttttatttatatttgatatctggtgacaattgccttagggtatattatatactttgtgaaagtatatacttcataaataagataaatgtaagttggagacaagacttctttagctgatttcatagcctctagttgcctgtcccagacagcattaagtctttgaagtcatggctaacactaaaaatagtggtgatggtgacatctctggcatggtcaatgcaccagttcccatgatagattctttgtttgtctccttcatccctccctccctccctccctccctccctccctccctccttccctctctccctctctccctccctcccttcctccctcccttcctcccttcctcccttcctcccttcctcccttcctcccttcctcccttcttcccttcctcccttcctcccttcctcccttcctcctttccttcctttatcttttggtattttgagaaagggtttctttgcatagcccttgctgcactggaccatactctgtagaccaggctggccccaaactcacagagatccacctgcctctgcctgctgtgtgctggaattaaaggcatgtgtgtatcaccactgtgtcttcttctgtaaaatgctcaccacagaatttgagatgggtacattcccttccccttttgatttccactgaaggaacatgaggtctgagcaggtgaaacaactgagtacatccatgaaagcttcatttctatttggccaccacaatagtaatggtccccttggaatttttcttgaatattctgcaatatagctttggcaggtcctctgtgtctgcttggagtgcctaatggaaaatgatactgtcagttgtcctttgcttgtgtggttagtgtaggtctagcaaagatggaacttgacttttaaaggaataatcaaagtattaaatccatcttctttctattgcatccttcctttctttgaacttaatagttgttttttgcttataaatatttattaatatggaaaagaatgtttttatacccatagtaggtattgtgtcattcaagaagaaacatatttaagtaacagagttccatacctcccccaaactgttggttgacatctccacagttttcactgaatataggtgatgtaaaagttgtagccaatgagttcagactctctgacccactgtatggtaattgattactcagtgggtgctataactattattgatgctatacttagtctttcatttttcgcaagacctgcgtatatcaaagaagtgtatgttggatcttttttttttttctttcatgagcaaagttctcaaatgttaattagcaatgacagataattcagtcagttgtgtgggctactgaaatggtgttctttaaaagatagacgtttattctattaaaagtgaagggcctgcaaaactcaggatgtcctcattcttaatagttgagtagtattctattgtgtaaatgaaccacattttctgtatccattcttctgccgtgggatatctaggttgtttctagtttctggctatcacaaataaagctactatgaacatagtggaacacgtgcccctgtggcatggtggggcatcttttgggtatattcacaagagtggtacagctgggtctacaggttgatctatttccagttttctgaggaacctccagattgatttccagaatgggtgtaccagcttgcaatcccaccagcaatggaggaacattctttctccacatcctctacaacatgtgttctcacctgagggtttgatcttagccattctgatttgtgtaaggtggaatctccggttgttttgatttgcattattctgattgctaaggatttgaacgtttctttagatgcttcttagccatttgagattcctcagttgtgaattctcagtttagttctatacccattcttttattgggttgcttgttttttggtgatttatttatttatttattcttttgagacagggtttctctgtgtagcccaggctgtcctggaacttactttgtatactaggctggcctcgaactcagaaatccacctgcctctgccttccaagtgctgggattaaaggcatgtgccaccaccaccccgtgtggtgattaatttgagttctttatatattttggatatttgcagacaaatggatggtactagaaaatatcatcctgagtaaggtaactcagacccaaaaggacatgtatggtatgtactccctaataagtggatattagccaaacatacaaataaacaaacaaaaaccgtacagaatacccaagatacaggctacagaactcaaaaagctcaacaagctgaagtgcccaaaattacagggatagaaatggaaaggaacatttttcaaaaaagagtgaagggcatatgagattgagcctcttctgccttagtttttctgtttttgaaaatataattaattatttcctcatctgatttttcatacaagaaaaaaattgaaatataaaaatgaacattacagaatttctagagttctctaaatctggtcactagtttggcctgaaactgagtggtcagcatggctggggtttttattctttatgggcaggacagaagcctatagagctccatccattctgtcagtctagtcagctgacctaagattccagggctcaggggtgtgtttttgtttttgttttttcattaattctgaatttctcatattattataacgtgaatatatgttcatttttctttggatgaaaaataataaacttcagaaggaaaacttatttagctcactatgccagaagaaaattgaacctttggtgtgggttctgtcagtgttgcccctctttgccctctgtctgcctcatctacttcatctcccttgattgctgggtgaacagcagcagtgactgtcctgattctgtcactgccgctgttaggaagaaaaatgtgtctgaattcatggagatatctttttttttttatttgtgagtataaggtggcaaaaattgtctcccagaatcatgtctccatctctgatatgtcttccagtgttatctacaattttttgtgaggtgaggtgttcatatgaaatgcaacatttctggatgaaaccccttcccatcaaaactccagattcaccatttcttctatcagttgatggtcttttctgtctcaggctttgggtcacacaggattctgtccactctcctaacttctgcccaggccttgttcattcttttttcttcctgcaacctttctcactttcccctttgcattcacttccatatcccaagttcaggatcctgtgatgtgcactcactcagagctccctcctcccctctgaatattttaataggttcctaattgattgcccctcctttagctcccctaagccctttagttaatcttggaacagtgctcatacaaattaagagctttaattactgtttgatttgaattgaatattattgaggaagccaggtacctatgtgcagatggatgtcttagcgttggtgcacatttttagagcaacacctggggagcagagagaagcaccactttgaagtacatgtgcctatttcttccatctcctttgaggtatgtttcctgtacctcactttggtttgtaattagtggaatctttgtttgtttggttttttttaaacttttttttaaagaaaaggatcaattctagcaagtataacttattaatcctaaaagtactcattctttataagatgaaccaaataagaggcattcctattatagaatgtgaacagagataaatgtttgattgtcagaaaattaaaggagtagcagtatttgaggcatttatttttcttgaaatctgagattatggtaatattgcttctctttaaaatttctctcaatttagctcgccgtgatgtcttttggacgcataagctattcttctgttctgtcagtagagctttaagaatgttgaatattgttatgttacctacaagcaagtgacattttatagctggaggcagtgaggactagcctggtcttcatacaaaagatttgtaagatgctttgcagactgaagagagggcttggactttggagagataaataggccaaagaatccatctggttaataaattagtaagaacataatctgttgatttccaatcaattggattatttggaatatgattttccagctgatcattcaacagtggagtgctcagtctccgccctgaacctgcaggctttctcctgtggcggggatgcacagagaccagggaacagctttttctgttcctgagtaatacttacttgatagacacacaagtgtctcttagtaaactcattttagccctgggcttgctcattaagcaggtcattctacctgtttacctctgtgcttttcaaaggactggcaggaccaattaacatgggactttgtcgtctaagtctgttcaagtgacactgccaagctcttgcagatacagagcaaatggccttttggtaacctttcttgtaaccgagggaggatttttgtaaaagtggatttttaaagtcaaacaaacaaacaaacaccttagataagtagctgctagcccggtgctgggctttgtgctaattatgtaatcttaccttctctaattcacttatgtgaacgctgatgcccaggagaacaacccaaattcaagagaagttaagaaaacagcccctattcaagcccaaggtcttagtcccaatacagtctctgtgggagctcaaagccacagtgtcaccccagcaactcctcaaaacctgcttctgcacaggccgttttacaagcctatggtgattgggactctgaaatttaagctccttcaaaaatcaacaatggatttcctccatgtttctctgctttctccacagtgggaatagcagaaactctgatgggaggtgagagggcactgtgcattcagtaactatcaaagcaatcagtggtgtaccgacctggccacctggactgattgagaatgtcttcagagctctgagctccctcagagctcagtgattcgtctgtcaatgataagtcttcataaatctgattaaattcttaagaacaacaacaaataaaacagatggaaggaaagaagagtgtcttctatttgaaattatttaaaagaattaaaaaaaaaaagcagcaacttgactcccaagagaccataacaggagtctttttccttctcaacgtttacatgaaataacacctaaatgtttttaagtgtgaacgaacatcccatggtgttcaggattatgtgatatagctgtctatttctcccacctacaattgggaagttttgaagacaatagccttatttttaaactttcctctctcacagttccctttctacatgaaagcctaaggaattcagatattgtcaagcaacaaaaccaggagttcacctgaggagctattgcctgtcagccctgccagtagggaccacctggcataccgtggtgatgtatttaggagcccatgaaacaattcagaacagggctggtttgtgcttggctccatgttgggagagctataacactcttgtgtagaccgaggttttcctgctgggtagatattgccacagcagtatttgaaaatgtgtctatagctgtttggtctctactggtcccctcactgacttcctggtagctcctcttctcttccctgcagtcaccattcctatgtacctgccatcttcctctattatttgtgctaaggggtggagtctttgttctctagctttcctaggcctttgtcaccaagggtccatagagctatttatttatttatttatttatttatttattcattcattttatttatttatttatttagttagttagttagttacttagttagttatttttgccaaccatccttcctaaccccactcttcactccttttcattattttccttcacttctcagctccagtattatttctgaaccttttggaagtggatctagcacttaaaggctgagccacctctccagtcctgtgtcatttcttcagtaaggttacatttgtatagactctaagtgccccaagcttcactttagtggacttgtctcaggtgtatcttatgtcaatttttggataatatttgggagagggaataagatgtggtaatagagctcttggacactgagacccctcttctagactcaaacgagactctggcactcagtagccctgagggatttttgtgactcagtggagcctctataaaatacctatgattattgtgctccattcttcgaatatggtagggattaaatgcattgatagcagaatgaaacccataggatgcagtatacaaggaccatagagagagttctgtcttgtcttgctacttaatttaaccaacgatcacacttctgtgagactgtgaactctgtgcttctgaggtctgtatagactttgttgcatagaatcactcctgttccttgtatggtgcctagcccactgccagagctgtttagcaaaagtgctatccaggccttggcccacagttagacaaactgtaaacacttcaacctccagttgagtcaacactgagatgtggcttgtgcacagggcttagaagtaggctcttggcatagatgttaatagtttttacttgatggctaaggtactttgtgttttacattttgttgaagggtgagccgtcctatacaggattgcaggattctgacaacagtacaaaactgtcttgtgagcatttgtttcacatctactaaactcatgacggtccattttcctctttagtatccatcattggttgtcattgtacatggaaatcctgtgcatcaaacagattgaaagcagagctgtttgagttaggtagcagcatggtttgagtatgatctccaacccttaatctacctctgcgtacccctttcagcctttgtcctaaacagtgatgctctcaaagggcattaagcaagggactgactgggaaggcctcatgagcaaacatggaagtatgcaccccaaaaagccataatctccaataattaaatcttggtgtggatagtatgaagtattgacactgtgaacgtcgtaagcatgtgtgatacactggagaggaggagccactgtaatttggtatatgcaggatacactgtagtaagcacctttcaccttagagaacaggaactatgatggagagaagaaagcaagctcagccactttcttagtcactacatgtcatctggctgagtggcttagtatggaaacaactccatagggtgctatggagtttatctgttcatggcatgggagaaatcactataggtaatcttgagaatatcacagaatatgtatcttgggtttcgagggtggggagctaggagtggttgggtgggtggaggaacaccctcagggcgaggggggataggataggggatttccaggagggagcaaaacagggaaaggggataacatttgaaatgtaaataaagaaaatatccaataaaaaatagagaaaaagaataatagaactaaattttttatgctatttgaacatatcaaatggagaattatgaataaaacttagtattgaataatataacagattacctaataaaataatcagacattttggtactagtaggattagctcaaaaatttaaatttttactgagaagatagattattggattgtgcagaatttaacggaaaaaatagaagtttttttcttttttttttcttcttcttctttttttttttttaatgttaagggaagcgcctcaaagaatggattcatctgccaatgttgttttatatatatacctttttgacactttaaaaaaagttaaaatatgtttcctttttatagagtcatcagtttgggactgatgactaaggaagccttagagtcttctcttacataaggtgtttcactatttccaacatgaggttccttctgaataagaaaggaaaaatatttagctgataagtgccatctggcttttaacttgggaaaactgtcttctagcctgcatctattttggagcaactattggatcagaattgcaatgaatccaagtcagttgattcagaatttaaactttcatgctttggggattgtgaatcacagcacatgtgggatgatacatgttgggggagaaatgggtctttctgggccacatgtgaaattaaagctgcctgtattctgtgtttattgcatgtatttatttttaccaaggttggcctgaataaacaggtcttactctgtttccagtcttatcattgggttttaaaaactaaaaaaatttgatttataaagttaacatgaattttaaaggctcaataatttctcctcttaacaatgttacctgaaaattcatggctcttcttgtgatttttgcatgtctagttttagaaaaacaacaaataagtagtcacaaagtgtttcctttgaagttatgattctctggctgaggagatagctggctcaaggagtatggtgctcacaagagggagggtctgagtgtggaccccaagaaccctcaggaagctggctacagtagtgagcaccgacaccctcagcactcttatcatgagatgggagggggggcacaagagttttcagaagctgtcataccagctagcctgccatcttatgattctcagggtcagtagttggttcaaggagtggggactcctctttcctgcagaccttatcttctgacaagggataacatttggacaatggtttccttaactaggggagctttctgtgttgatcatggtatgttctgatatgtttactcctccagtgaaaaacaagttgaatagatatacctatagaaggagttcaagttgtttaatctgtgaatatggacttccctgaaaagggctgtacagatcaggtttctccaactatatgatttttgaaatattctaaaggagttttattctgtagatttccactctttgtctgattgacactgtggccttatagtgactttctttgatgacatgtcataaattcttctgctctatagtactccaatacatttaaacattttggaaattagaatgtggtttataataacaacatatgttttcttattcttttcctttatttatttttctttttgtaattctaggaaggctattaaaaattgaaggtgccttagaatgaaatgaattattaaataatgcagtatttaattctaatttattcattaaattcagcctaatccacagcagcctaatattaagtcaaaataatcgaatgagaagaaaaagactgttttgttggaaaattgtttacaactttataatgagttttgttttttagacctcatggaattttttttaaaatccatattatatagttagcttcctctggtttcagcttaatactgaatggtttaatagctgattctttgataggtattatgacctattttagagttgaggaaaaccatagtcaaagaggcctgtgattaattcactttgagcacaggattttagtggaatatcgcctgccactcttcttctgttaaattatttacttgcatgtatccacacctttatattctgacacattccagtgattctcagaaatattattccttaaaacttctggaaactacccattcctcaacacaacaactcaccagtgccatgtgctagatttcttttaaagaaggatgaggactaagatatgcctgcctttctaccagagacaaaagtacatgagagggcaatctgctcccaaatgaggcccacccctgttgggaattctggtggctaacagggtatgtgcagaaagggactagaagttcaatgagggctgtgctggaagtgtgtaaaaggccgtcacaccccaccactcatatggacttctgattatacataaaccagctttaagaataacctcaatgctctgtcatagatgtacttggacatgctggctgtcagcagcttctagcactgacagcagtataaatctgagtccctctaatctgcctgcaaatagctgccaccaccttgatctaggctaatcaaaggaacaagccagtaggggtttagagggttctgtgctgcaggctgatgccaccattaatttaatagctgaaatgcagtagattgtgaggaaatatgtttaaatgctgacctcttggagcaagagactaaataaggtactaccataattagtgttgggcttttttgtttttgtttttgttttttaagaagggacatgatgctccctgaaatgtgacgttgcagaactgacagtcatgtcccaggtgaacatcagctttgagaacaagtcttaaatggtattgagaaatggcatgttcttgggctttggtgagaaatagtggtcccccttcacttctggttcctaagactgaataaaaatgaagacatggctccatctaggtatggttcaggagaaggcttttattgtaaatatgagggagaatccagccagaagcatctgtaagagtctacagatggccagcagctcagactagatcatgagaggaaggagggaaggggaaaagaagagaacagaagagaagaggagaaggaaagagaaaaagaagacgagaagggcaaagggaatcaagagaggactgagagccaggagagccccacatagccaaaatggctgtaaataggaaaaaggaaagaaagggaaacaaagcctgggggctggaggggcttagggaagtgagtagggataagaagtattgagaagtcagaactccaggtaacaggtacttaggatgcttggagcctggtggccagcatcccctttgatgtgttaaatagtcaactcagacttttgtcctggatttctttgagacttgaggacaaaggcaaatataggctgttactcttagagcttgagttaagtaaaataaagaaaggaaaagaaagagaaaaaggaaaagaaagagaaaaagaaaaagacacagactctttaaaatatttatgcccataaatatttaaatggcatgctgtgtgttttctgttgtacaaatctacctctgagacaacattatccagcggcaagtttctgatcagctgtgagttaactgagtcagcctgccttgcctgggcagttctttccatactctagctcactggcaatgtctttgcgtacaagatacctgtgtattttcaggattaacatactaatcagcttattacaagagtccattcactttttggacacagtcagcctagtggttaatagtattttattaggactgtatttgataagcatatttgacaaataatgcattctcacctctttcaagtaaatttcttaaaattctttcatataggaatttcctctctgataccagccatgtcctagagcctttctttctattgatcaacttttattaaaataagtcttgaatgtgtggtcacaactacaagtaaaacagagcagctgttctcagtattccctacttagacaagataattatttgttccaattatatctcacatacataagtcataacccatgtgaaatgggtttttactatgtgcattgctccagtatcacacaaataacgcgttaagaatcagggttttattcttaatgccagacctaagggttagcagtagaaggccaacacaagacaaacttgataacatttgtgtgtgtatttgtgtgtgtatgcatggaaaaatatacatacatacatacatacatacatacatacatattagggtttctgattttgagtttttatatgaggaattttctccaacagtttcatatgctttcaattgaagaaacattccaaaatgttatttggtggcacttaccagagtaatagaagctgcttgctggttgctttctcttcacgtcagactgaagagatgaatgtaataaaggagcatccatccctgtgtaaagatgtgatatagtaaatgactttatgaagacagatggtaaagatcgctatgcatacatcaccatggttgggattccggtgtgatctggcactgagacgaaacaggtgcttcacagaatgcctcatcttgccctgaacttctgtcttgagcaatactctggttacattttttttcctcctagagtttaggtacacaggaacttcctctccccttggcaccttctgctcattcagaaatgcattcttttttagttttcctatgaacatcatttatatatgtcatcctggcacactctctgtgtataaagtattaacatagtgttatgattctaatggcagctggtattcaaggcgtctatactaagtgttcggttggacatccccaaaaagcatcccagtgtcacctcctttcatcctcacaaaccctttgagctggggacttgcattatgtagaaggggacaaacttcactggggataacacacctaaatccaaggtgagactgaaaacaggtatgatgggatgcagacttgccctgaggccacttttctgattctttttttatcattgtttatttctagttcccttcttgatcagttagctgctggagatgtctgcatctgtctaaacagattcttggtggttcttgcaatggaagagacagtaggaatttgcagagaacaattgggccaagttcagccactgtgcagagctgattctgaaaagtagctaccttggaatggcttaaaagtaaaacaaaatgtattaactgaataattttaaaacaaaacccactcatttatgtctatagaaatctgaacctacaaggctggggtgacacttcagtacagcacatgacttgaaagcatgaaaatctctaatccattttgcagaagccatggggaaaaacaccaacaaaaagtaattcatgtgccaagttggggaggtggagataggtggggtttttgtggctgggtcaaccagcctactcaagttagagaccctattataaaatctagatggatgacaactgaggaacaacaagaagactgatcttctcagctccacaggtatctccatacacattcagaacctgtgtgggtgcacatgcacacgggggggggggggctgtggagaggaaggagtagagatctaaaaatacaaatgcttctgtttgttttgccatccttctgtggacaccaagaaatggactgtatttaaaaggtgcccatagaagggtgacaaagccaagataggagcattcacatttaagttctgcaaggcaggtaattaaaaagtaaatctggtcaggcaaaaaataattaaaccgttcaaatagcatataattacatctttatgaacaaatctttgttattataagttggatcatgagagagcaatgtgtcaagtctttctaacagtgactatttttatttcagtattttctaaaatacaaatttagcttattgcgtgaagtttgtaaacttttgaccaagctttaccttgtttgaagtttcaaacttttcatgtaaactaaagtgactccctgttcagttttagcaatgggaagtcacctgggtcctcatatcatctctagatgatagacccatttccatcctttcaatgttccttgttttaaaatctcatatacttaaatactgttagtaagaaaccatagaaataataattaattccagaccattttgattaaaatcatgtgctaactcttgaggaaccaggtgtaggtttatatatctgaagagagagtggctgtggaaactaataatggaaacaagattttggagcattgtagcactgtagcattgtagcagcatccatctacagcccgagactgatgtgctaattagtaattactgccttgaattcattacattggatcctttaaatacttttgatgacacttccttggtctggccaatcacagttgcttttatttatttctgtggtggtggagatcaaacttaaggccagttgtatgctagagagttctctcccactgtcttcttctttaggtatctgttatgccagtatctcgtgttgaatcctttcctaataagcagtgatgttggacttaaagacaacaaaacgaaacagaactaatcaagtcttcttgggcatgtggttgaacttccctaagcctctgcttttgcgtctgtaagatgggtgaattctcagtcacttccaggattgtcactggcatgagactgacacaggctgagtcactggtgtatggtctaggaaggttgttagttcttagcctgttagtggcagatgactgatcagtttgactgcagctgcctttattagactttggcttgtaaccagagttcagttattcagggtctaaaatgaagacaagtaatgagcatcgcccctccctgtccaggtttgggcatttatttatatgggaaattctacagaaatatagatatagaactgtgtattattgatttcacactgagcagataaactagaaaaccaagagcctttaaatctcatttggagttctagccactgacctgtgcttgagattaggggctgggtgtccactatatcatcctgagcttaaaaattgtatctttcactagtcatcatagttaacagttttctttaccaagcttgcagctttctctttcctgtcatatcaaagcatcaggcctatactctgaactgatggagacctgtggggtgactctcattggaagtgtttcatgttgctagggaaagtcttatttactcaaggtattttccatggacttgaagtgaaactatggaatgctcctcatatatatatttgtgtgtgtatataatatatagcacataccatattatatatagtatatgctatatatgctatgctattctattatatactataaacagtatttatatatactatgtattatgtactctatagatatagtatatatacatatatgcatatgcgtgtgtgtatatatctatgtgtgtatgtgtgtgtgtgtgtgtgtgtgtgtgtgtgtgtgtgtgtgtgtgcgtgtatttcaagaataaaagaagttcaagaataaaagaattcctaaatcaaggctctccatataccctggtgaaaattgcaaggtgtttatagacaagttgaagaatccaagtgttggattttagatgttgtctgatgactttcttaacctttgggtttggaggaaactcatagttcttaattcattccaaaacaatttacctaatagtcataagaatatcaggacatgcacagggatggtaatgaatattgaggggactaacaatagccccaaataatttggctctgggcctgcagcatcgcaactctccacactcacaagtcctaattggtctgtcagccttgtttgattataaagttagatgtacatttttctactgaaaaattcaattcacaagaatttttttgtaggaacttgtatatttccatgtagtagaaacgcggaatcataataataatttattgttgttgtttgctattatttagacaaggtcccatccatggaccatgctagacccaaactcattctctccatgaaccttgattattaagcatttactctccatcctagcttttagttaattatgttttagatttgttcattttcatttctgtgcctttgtgtttggtttgcaccatgtacattcttggatgctgaaaagaccagaagggaggacttggatcccctggagctggtgctacaaatgttgtgaaccaccatgtgcgtgctgggaagtttcttgactactggatcattatttctttatttaatttttttattaacaaatatgtaccttttgccagtttaatttaaaatcctattcattattcaaaatcaatgttatcgttgtcttcatccctgtgctaagaactccaggatccaagtttccatcatacagtttagcagcaccaaactatttcaaagcagcttatgagttttttctgcttagagagtctgtttgaccagtctgcaaagtcttccctgcaacaatagatccctacatcatctatgcaaactagtgtcttcactttccctatgatcccacataaggagccttgtactttataaaaattgtctttagacttttaaacttccatttaaaaaacttagaatgatcaggttactccctcctctgcaaatacccctccctctatggcgcctttatctcttctgttaagtgctgagcttcgtagattgatgaagcacttctctcacattcaccctgcagtagctcttattgatcatctttttgcatgtcagggattcttagagtttctctaggacagcttctgagggctgacctctggcttctgggttcacagtggatcctattcctgtggctcttacacgactatttagaaagtcttgggttggagacagcggagtttctaaggaaccctccatatgattctctttgccagcccctttcttttctttttccattttttattatgttttttcttcatttacatttcaaatgctatcctgaaagtcccctataccctcccctccccctgctttcttacctacccactcccacttcttggccctggtgttcccctgtactggtacatataaagtttttaagaccaagggggcctctcttcccaatgatggccaactaggccatcttctgctacatatgcagctagagacatgagctctcggggtactggttatttcatattgttggcagacccctttagctccttgtgtcctttctctagctcctccattgagggccctgtgtttcatccaatagctgactgtgagcatctacttctgtgtttgccaggcactggcacagcctcacaagaaacactatatcagggtcctttcagaaaatcttgctggtgtatgcaatagtgtctgggtttggtggctgattatgggatggatccccgggttggacagtctctggatggtccatcctttcgtctcagctccaaactttgtctctgtaactccttccatgggtgttttgttcccaattctaagaaggggccaagtgtccacactttggtctgagttctttttgagtttcatgtgttttgcaaattgtatcttgggtattctaagattctgggcttccacttatcagtgagtgcatatcaagagactttttttttgtgatttgattacctcactaagaatgatatcctccagatacatccatttgctcaagaatttcattgaccatataattggtcacaaaacaggccagcccctttcatttgtgatgatgaacctgcttaggtccaacctcccatgagataagattgaatcacatattttctattttataatacattacaatgtattatatcaatgacttcttttgactctaacatgacatgtctgtttttgcatagatttttctgaatgattttgaaataccaaaattattctgaatgggaaaaagtaaagatacagtttaactttttcattgtcttgtcattctgatggttaagctcaagtgttatctaacaaaatcttctgtgctctcactgcacaaaaaaatgctgttcacatgcttttgaaatgtatagcctacttgacatttcccccatgtaatcaagcatagtgatgttttccttttcagaaatgcatgcctagatattcctgtgtatgtgttgcaatggtacaaagagctcatgcaggagaatggtcaataagcacaggccttgagtattaatgggcttctttgtgaactctgatttatccattatgctctatgtatacttggtttttggtaaattgctcaaaggttctgataccagatcattttggtacattagccttgatcagtgttctgttgatgcccattaaggaaaagctatttcttcctgttcaagagaatataatctacctctggcctgggtagagaccaactttccaagctactcaaaacatgagaatttattcagttggacctgtcaatcaccttacaaaaccatcaccccttaggaggtggattcacctaatgcctcccattcacctaagaggtggaagagtaattattcccttcttgagaccatgtgcttttcttccacagaaccactgttttttccagttgctgccgtgctgccactgagcacactgaggtctgcccccattctaagtgctgacttagacaggcataactctcactctctctccatttatgtctgtctttgcagcactggccagtgctcaactatactttccctggtacgtggggacttttttgttttctgaagctactatcttccttttgcagtgtgaatgcttgctgaacctccatgcctaactctcaaaggcatggctttttctcctctttctccattgtcttcctcaaagcacctgtaaagatttacagcctacctgctccaccagttctttgctttaaagtttcagcaaatagtcctcaagcttcctttggagtccatccttaaactcttttatttgtgagactaagaactcaaagagggacccaaatttcctggcaacacatgatggtcaacaggttttgagaacaattatactaaagatgcaccatcactacctttttttcaaggtgctcctggtattgagtccaggtttttgtttttgtttttttccttgctgttttaggtttatgacccttggcacttttgacaaatgaatttcagctatgacatgagtcattgcctcttgctgcttcatctcaacactgtagtgcattatgggaatactgcaggagtcgttccattcttccggtgtggggattcttctttctctccattccattgcatcatctactctatcctttccccatcactatagaaacccactgttttctccccagcttacttgctccagggaggcatagtgggtttctcctcttgtttgctgctttgtcacatgcatgctccttggtattcattgctcctagagacatagacggtgtgtgcctccgtgtatgtgtgtgtgtgtgtgtgtgtgtgtgtgtgcatgcatgtacatgtatgtgtatgtatctatttgtacacatgtgtatagttgtctacagtgtgattatttggtttttctcaccatctctcatatatacattcatcttataactgaagaaactctgaggtgtttcacatgtgcctgcatcatgaagtagcttgtttcattccactgaggaagactaaggctcacggggcgatttttttttctccctagagggtggaatattcttttcatttttctatactttgtgaatgttcaccacaatacaggtttgcattatgaagtttctttttctgtttcttttatattgggttatttttgtgatactctctcataatgtagccatgttgctccctattcatattcttcagtctcctggttctgggaatgtctctctacttccagctgcagtgtgatgtttctaaatgataaacatattttttgtgcctcttcagagacacatgttctccacaaaacagcagcatagagagaaccagacacctggtgagatctggaactttttcacttttccccctttttgttttgttttaagtgatagacccttacagaggattagtcacttggaaagagaaatggactaggcacttaactttcaagagctagggaattatgtgaagggatgggacacttggatggaaacttcttaagcctatagtaacttataccgcctgtgtataataccaacacaaagtgagtttcctggcaaagcttcataaacacatttcaactagatataaagattttataaaccacattcttcgtgagatgttcgagggaagaatcacagcccccaggatgtcattaattttatatctagctcatattttaagagcagctagaaagtgcacatatccataatccatagttacattagtaaagtgtgatgaatatacaggtagacattaaaatgatcaatgtagtccaagaggccagtaaagtcatatggctaagagcttttgatggagcaggagatcatgtttcaaattccctctcctctacttccctaaccttgactaatctactaaacttcttaacctactctggtctccattttcctcatccacaaaaattaagatttaccttacagaactgttgtgaagatgaacacacttcatgtagtatctttggcatggcgccttgtacttttaggaaattctgtcttttcccctctgttagtacactttgttgcagtataccatgcaaaactcattgttttgtgtttcctggtctctatgatcagtgactcaatcttaaaattcagtaactgggaaatcaagcagttggttagactttgctttctaatatcttttctataaggaatatctaggtagcatgtttttgttttgtttttcgttatgaaaacacaatggaggatgggcattctaaggatgattttagaactttcccatcaagaacctgtcattatagttaacgacagtcttagagaattcacatcagtaggctctatgagcaatcctatcccaagtcctctggaatcgcaagctgcatgagtggtggacagctcttcataccttagactatcatctggacgatagtcagaaagagccattaatatgtttatgacgagaatttgttatctttcttgtcagccttattttcttctgtgggtgaaatttcaagtacattagaagtcccaggaagggatagcctgttctttatctctcagtatagatcttcatctaggttactaagttgttctaagagtttgctatcggaagatgcccccatttacttggctttctgctttgagctacactatcactggcaaccattctgtgattctctaccaacaaaattctcatccttgctccctgataagcataagagtcaggggacttattgcttttttattgctgtgtaagatggaatgatttctgtgcctcatgtccatttatcatcaaaagtttatccagtgttctcaggaactccaaatgataatgctgacttaaagttatttgagatttcttttagggtggtcaacaagttgtaaaaattgcagggaaacctatctcaaaagagatcactgaacgtgaacaactagtgtagtcgtattttgactggagaatggatatatagtatcacatattcaatctgtcttacaggacaaactgagtcctgagttgtttatgtaaattaattacttaaatctgattttaaatctgaaattctagattgaaaacattatttcttggtgaaatggttaaatggcaattaaatctgtatagggacatctgcctttggtgtgcttggagtggtttgtgacaagcagcacttctctgtaaacactaaaaagcccaatgttgacaaaagtgaagaacacctcctttgcaattttagtctcccagaatatgataactcactgaaaatggcagctgtggaggagtaagccaatatttttcacactgcctttgtctacatgagaagccaggcataagaagaaagcagaagaatgtttgaatgtttgatggtctcctcaggtagaagagacaggcagggcaggaaagcagccaagagtcagaggaagcaaccgctcctgaaaaatattaagccttaggatagtagctccacccttccaccttgaaatgcaaattcacttaaattttatgttttatagtgaatgatactaagaaaaaacgttctggagaagcagagcaatttctgatagcctctctagcaccaagaggaaaaataattgaagttcagcatccatgaaggacaagagatgctttttaacatcacaggcccaaactgacggtgtgcagacagccagagggaggtggactccttcaaaaggctgacttagagtcacttccttagagtcacttccttcttgaattaggtaaagataagttgcttctctcaaaccactggtcatataaaggaacggagacttaacaacagaaacaattgtaatgtgattccatcagtgtgatcagaattagagctaaggctagacctctgaagttggcttgctctctccaccccactcctcacttcatgttttaaactatgtttcttgtgctgtagacatttaagttgtaactgctagtatcctatttattgttgctgtttgctttgggtttctttaggcatttggccttctatgtggctccatattgatgagcaaattaaaggcatggatatggtgctagcactgtggcttttgggtgattttaaggagatgtcaatataattttacctttttttcttgcacagggtagaaagacagacaataggtgaccatattaagaacaaaagtgtttgggtttttttttttttttttttttttttttatttaaagctagcaaggtttgctagcaaaatcacatatgtttttgtgtttggattctttttggaaaaacaggagattttcagggcctatggaagtaggagattaaaaacaatcaacttcaggcaggtttaaacagtaggcccatgagtggcttcctgggtacatacagggaaccctttcctctcctctcctctcctctcctctcctctcctctcctctcctctcctctcctctcctctcctctcctctcctctcttttcttttcttttctttttcacattcaaactgcttacagctttccatgatcgagaattaggaatgagatgggtctgtatgtaccagtgttggcttgtcttaacagttaaagtgaggagcctttatatcaagttccattttttttctcctttcataggagagaatagcctgtctttgaggcagaatgattttcttaaatcaaccttcactaagaagtgccttttaagtgcttctcaaagctgggccctagaacaagatctctagtcagtgattcactctgaccccaagggctttggaatctgagagctgcagtgaatctcaggaagacctgtgatgttacctctgagcttattagaagtgcatattaatgagtcttatgcaatcctggaggatctgagtctctatggatgtagctttcaaaactatttcaatagattatcaaatggtccttgttgtgtgagaaactgttaagctttctctagaacactcacttatatgaaccatgtggaatcattgggtggggctagggtcactgaggtgcacacagaaacagactgtggcatagagaaagaatgcatttttactttacaggactctgtagtcttagcctgaaaaccccatgttgtgcctcttcatcaagaggcaaagcttcccaaccacccagaagtaaccatgttatatttactgtagaccacacctaccttatctcttttttgttattggatattttctttatttacatttcaaatgttatccccttttccggtccctcccccttggaaactccctatcccatcctccctcccactgcttctatgagggtgttcctccacccacacaccaactccaacttctcagccatcagtttctctacactggggcatctattgagcctttataggaccaaggacctctcctccattgatgcatgacacggccatcctctgcaatgtatgcagctggagccatgtgtactcctttgttgatggcttagtctctgggagctcttgggggactgattggttgatattgttcttcctgtgcagttgcaatccccttcaactcctttggtcctttctctaactcctctattggggacccctcaatccgtccagtggttggctgtgagcatccatctctgtatttgtaaggctctagcagggtctctcaggagacagccataccaggttcctttcagcatgcattacttggcatctacaatagtgtctgggtttggtacctatatatgggatgttcccatgtgggacagtctctggatggcctttccttcagtctctgctctacacattgtctctatatttgttcctgtgagtattttgttattctaaaaaggaccaaagctcccacactttggtcttccttcttcttgaccttcatgtggtctgtaagttgtatcttggttatttgaagcttttgggctaatatccacttgtcagtgagtgcataccatgtgtgttctttgagactgggttacctcactcaggatgatattttctagttctatccatttgcctaataattttattaatccatcatttttaatagctgattagtactccattgtgtaaatgtaccacattttctgtatccatttctctgttgaagaatatctaggttttctctatctcctggctattacaaataaggctgctatgaacgtagtggtgtaaatgtccttattacatgttggagcatcttctgagtatatgcctaggagtggtatagctgggttgtcaggtagtacaacatccaatttcctgagggacaaccaaactgatttccagagtggttgtaccagcttgtaatcccaccagcaatggaagaatgtttctctttctccacatcctcaccagcatctactgttacctgagtttttgattttagccattcccacagctgtgaggtggaatctcgggattgttttgatttgcatgttcctggtgactaaggatgttgaacatttctttaggtgcttcttggccatttgatattcctcagttgaaaattctttgtttagctctgtaccccatttttaatgggttattttattttttggattctaacttcttgagttttttttttatattgaatattagccctctatcagatgaattggtaaagatcttttcccaatctgttggttgctgttttgtcctactgacagtgtcttttgccttatagaaactttgcaattttatgaggtcctatttgtcaatccttgatcttagagcataagccattggtgttctgttcaggaaatttttccctgtgcccttttgctcgaggctcttccccacattcttttctattagtttcagtgtatctggttttatgtggaggtcctagatccatttagacttgagctttgtacaaggagataataatgggtcaatttgcattcttctacatgctaacccccagttgaactagcactctttgttgaaagtgctgtctttttttccattggatggttttagctcctttgtcaaagatcaagagaccatatgtttgtgagttcatttctgagtcttcaactctattcctttgatcttcctgcctgtctctgtaccaataccatacagtttttatcacaattgctcagtaatacaagttgaggtcagggatagtgattccaccagaagttattttattattgagaatagttttagctatcctgggttttttgttattccaaatgaatttgcaaaatgctctttctaactctatgaagaattgatttggatttttatggggattgcattgaatctatagattgctttcaacaagagggccaatttttactatattaatcctgcaaatccatgagcatgggagatttttccatcttatgaggtgttctttggtttctttcttcagagacttgaagttctagtcatacagatcttcacttgcttggttagagtcattccaaggtgtgtaatattatttgtgactattgtgaagggtgttgttttcctaattatttctcagcctgtttatcctttgagtagaggaaggctactgatttgtttgagttaattctatccagccactttgctgaagttgttaatcagctttaggagttctctagtggaatttttggtttcacttaagtatacaatcatatcatctgcacatagtggtattttgacttcttcctttccaatatgtatccctatgatctccttttgttgtctaattgccctagctagaacattgagtactatattgagtagatagggagagagtgggcagccttgtctagtccctgattttagtgggattgcatcaattttctctctatttagtttgatgttagctattgctttgctgtatattgcttttactatgtttaggtgtgggccttgtattcctgatctttctaagacttttaacattaagggatgctgaattttgtcaaatgcttttttagcatctaatgaaatggccatatgtttttttttctttgagtttgtttatgtggtggatttcgttgatggatttctgtatactgaaccatccctgcatccttgggatgaagcctacttgatcatggtgactgattgttttgatgtattcttagatttgattggctagaattttattgagtatttttgcatcaatgttcataagagagattagtttgaagttctctttctttgttggttgtgtggtttatgtatcaacataattgtggcttcatagaacaaattggctagtgttctttctgtttctattttgtggaatagtttgaagagtattagcattatatcttctttaaaagtctgatagaattctccactaaacccaggtcctgggcttttaatggttgggagactatttatgactgcttctatttgtttcagggttatgggactgtttagatggtatatctaatcctgttttaactttgacacctggtatgtgtgtagataattatccatttcatccagattttccaatttagtttaatataaccttttgtagtaggatctgatgatttttttcgatttccatggtttccattgttatgttattcatttctgattttattactttccaatactgtgtctgtcccctctggttagtctagctaagagtttatctatcttgttgattttctcaaagaaccagctcctcattttgttgactctttgcatagttcttttttatttctattttgttgatttcagccctgagtttgattatttcctgccatctactcctcttgggtgtatttgcttctttttgttctagagctttcaggtgtgcagttaagctgctattgtaaggtatctccaatttgttttggagttttcctcttaccactgttgtcattgtgtctcataggttttggtatgttgtacctttattttcattaaattctaaaaagtctttaatttctttctttatttcttccttgactaagttattgagtatggcattgttcagtttccatgtgtatgtgtgtccttcgttgtttttgttggaatttaagaccatccttagtccatggtgatctgatagggtgcatgtgattatttcaatcttcttgtatctgttgaggcctgttttgttaccaattctatggtcagttttagagaaggtaccatgaggtgctgagaagaaggtatattcttttggtttagaatgaaatgttttacaaataactgtttaatgggttatatgatccatttggttcataacttctgttagtttcaatgtgtctctgtttagtttttctttccatgctctttccattgctgagagtggggttttgaagtctcccactattactgtgtggagtgtgatgtgtgctttgagctttggtaaagtttcttttatgaatatgggttcccttgcatttggagcatagatattcagaattgagatttcatcttggtagattttttcctttgaccagtatgaagtgtccttccttatctttttgataacttttggttgaatatcaattttgatattacgatggctactccagcttgtttcttggtatcattgccttgcaaagtttttttcctgccttttactcagaggtagtgtcagtctttgtcactgaggtgtgtttcctgtatgcagcaaaatattgggtcttgtttatgtatccagtctgttaatctatgtctttttattggggaattgagtccattgatgttaagtggaattaaagaaaagtgattgttacttcctgttctttttgtttttaggattgcacttatgtttatgtgtctttcttcttataggtttgttgaaagattactttcttgctttttctactagtttcttcctgtgttggtgttttccatctattatcctttgtagtagaaagatactgtgtaaatttggttttgttatggaatatcttggttgctctatggtaattgagagttttgcttggtatagtattctgggctgtcatttatgttcttttagggtctatatgacatctgcccaggatcttctagctttcatagtctctggtaagtagtctggtgtaattttgatagttctgcctttatatgttacttgacctttttctcttactgcttttaatattctttctttgtttaatgcatttggtgttttgattattatgtgatgggaggaatttcttttctggtccagtctatttggagttctgtaggcttcttgtatgttcatgggtatccctttctttggttaggaaaattttcttctataattttgttgaagatatttactggccctttaagttgggaatctttgttctcttctatatgttttatccttaggttttatcttctcattttatcctggatttcctggatgttttgtttagaatctttttgcattttgcattctctctgactattgtgtcattgtatcctatggtatcttctgattcctagtttctccattctatttcttgtattctgttggtgatgcttgcatctaagagtcctgatatctttactagattttctaccctcagtgttgtccccctttgtgatttctttattgtttctatttccatttttggatcttggatggttttgctcatttccttcagttgtttgattgtgttttgctgtaattctttaagggatttttgtattccctctttaagggcttctagctgtttacctgtgttctcctgtatttctttaagggagttatttccatccttcttaaagtcttttatcattgtcatgagaagtgattttagatctgagtcttgctttcctgtgtgatggtgtatccagaacttggtatggggggagaattgggttctgattatgcccattaaacttggtttctgttgtatatgttcttatgcttgcctcctgccatctgaatatctctagtgctacctacccttgctatgtgactggagcctgcccttcctgtaatcttggttgtgtcagaattcctcatagttcagctgtctctgtggtcctgtgattacgggatcctgtacacctaccttatcttccttccagccagagattttgatactctgtgaacgtctgtgtcctaattaggaaagtgatatcagggactcagctgtgctaggaagcaattgctaagaatatttctccttgaaaaagagggactcccatccggttgacagtgactgtgaggctgaatgacccacgatgataggtaagtgtagagcagtcattgttaatatgggagttgatggcccattttataggggtcactgtagaccatctggcatatcagatatttatataatgattcataatagtagcaaaattacaattttcataacaaaaacaattttatggttagaggtcaccatgaggaactgtataaaagcatcatagaattaggaatgttaagaacgactagagaaaaataaattggctttcattaggatgatggaaaggtagatgaaaagccaaactttgtaaagacatcacttcgtgcatcataaaatgaagttctcaagaaaaacaattcattatctctagattcttatcaaactcaagaacttctcagcttaatatttatatataacaaaggctttcctaagataaaaaaaaattccaggtttaatcagattgtatgtgactatcttaaagtgtgccatgtattgtgttttgggtaggtaagatgcttccctcccccctttcttctattctgtaaggtaaacaaatacaaaagaaacagttaaaaggaagtttgaaatgataaattgttctaatgagtctattgtttttctccagcctatttaaaaagagttcttcaatgagctactttattgttcaatgagtagaagttccctcttctacctcaaaattcttgggagaaagtttatatgtattgttcagcaggtatgagccttttaagtaatttctaagactccagttctttaaatactctgtgttcatttaacaagccagttatgaaactactctggctggatttgcttataatttcagaatcattttggaatggagagaacaaatattggttctttctgctgcttttgccctgtgatactacatttggtctaagatcccatgctgtgcaattgcaggaggtaggccataagagcattctgtatgtgagagcctgctttggtgacaatacttttgaaccatacattttagagatttatcttctgtattaagttttaaaatatagttgcaaagtaatgagaaaaattacttcaagtgtataaatatcgtgtatgttgggttccattagagaatctttgggcagcatagtttgggcttagaatttgatataaatgaacagatattcctgtgactatgcattgagcttctttgcaagaaatagcaataagactgcttgtaggattcttgagatagttggcatataatgtaggttatgttccagcctaggacttggtacatagttaacaatgtatgtggcctttagttttattgtctaaaacaatattatttgccatttgcttaatttgacataactaatttttttgtggaggagatatctatatctatgtcatctaaatcatttatatctgtttctgcatttatatctatgtctatatcattgatatctatatctgtatctatatctctgtcctcttccaagtagagatgggcaataggatatttcctcttgtctgaggtaacatctggctctggaaacaggcagatggctctgaatactggacttttcgtgggaggagaagctaagcaagggcagcacactttttttttttttcagcatctgtcacagactctgagatcttatttactacaaaagtctttgcttggctaattgacagcagtctaaattttgtgtcagtcctccccctccccacccccagtgcagaagttgtaggctggtaactatgagtaagcaaacggctctggagctgtgaatataaagcagggttgagcatgactaactgagacatgggaaataagaggggacagggaggctaaagaatacagcatgcacagcccgtatcagacttcctatcctgtgacttcctcctggccacatggctttggtctttgggtcattatgaacatttggatcctggaaagaagcagaatgagtgatagtgtccctgatttattcagaacaatcatcgacagaatcagcttgataagatcaaagtctcaaagcattccctggagggtgtgtgtgtgtgtgtgtgtgtgtgtgtgtgtgtgagagagagagagagagagagagagagagagagagagagagagaaatgtagatacaatttcaggctgctatgggtcagagaagggcccatactaaggtccttctcttccttttcaaaaagtttagtaagttggaaaaattggctggaaagtatagcatttcaaatatgtgcaagtctgggtttaagtccttgcactctgacctacaattgtacacctgtagtctagggtgacaggatctacttcattaagtgggaaagctgctgggagctgatctaactgcagcccttgccattcttacagttatttaagaattctacagtgctaactactactacagctgaggctgtgattgattcagagttgaatgtggaatgtagcttcacccttgtgtgttatgagccattccaatttcatgttttcctcttaacttgtagtcctgtcatggaagaccaattgacttttggaatttcttaattcagttgaactattcagatctcttgtctactcataatgaggatgaaggaagtatctgacctgcaagtctgctcattgattagatgagatggcttgtgccatcctgagcatggtggctgagacagtcaatgctgtggaccgttgacaaagattcagtacattttggatgaatgaacaatcagcactttccagtttctaaatggctgtcaggaaggcttcctaagaacatacagcattctgtagtgttatagagtgcttatttatgatttgtgtttgttctgtaatcatttgctttctctagcaaatttgccccctttctctgcctacccaacattgctatctctgtaaaaacacttacctggctccagcaagggtctccatagacctgaggtttattgacgccggctattgatcgagaccatcagtgatcggttcttaaggtatatgatctcactttagttgttactttgcccaatttcaatagagctgtgatgattccaagagctcagcagaccttgtctgcaagctcagaacacagatagaatccagcaaaagtaaaagtgggaaataaaaaataggagttaccagttagagtcagcctcttattttagaataacttcctgtagtctgggaaaattctaggaagtagatatgtagttcaaagtctctcagaccgataacacttgtctcctgtatcagacaaacgttttctgaagaggatttttcattctgctggaaaatgaaaaaaatctgaactgaattaatttcagtgtcaaatccttcagaaacgaaaatacatatctttggacttcgatctacacaaatgaataaagtgttgattgcaatatcagctgcatgaatgcagttttctggctttcttttcaccacttcaatttcctaagagcctaagataacatctagcatatccatagcaggcctccagcatatgctattgagaaagccttgaataaaaggagttcagtataggattgaactccactttgaaaaggtcccagaaggatgtctaggcttacataattcctggaactctacaaccctgctttcctcacctatgtagatgacattttgctcaatatttcagcaggcatgtacactaatcctcataaaccaagttggtggaaaaaaaaaacccacacacatttttattgcatcatgaagtatataatttctcactactatatcaactccaggaccatatcaggagggtcgtgaaaaacggctttgctatcttatctaaatttttcatttaaaagtcaactccaataacactcagtcatttacaaggtaaactccctgggaatgctggtgactgtatttgcatattttatccatcatgaaggttcttaaagggctggaagtttatggttttgcagttcctttccataggcatttgaatgaaggctcagatggggtagcctgtgtttcagtagcactgtgtgtggtgcagacatcacacagggaagtgtgtgtgtgtgtgtgtgtgtgtgtgtgtgtgatggcttgctgatgggcaactcagtcattttgctgctaactgattgataggctgtggtcctttgatggattagtgtttttcttctttgccattgattctgcccagtcagtacagttccaacatgcatggtataaaatacctgcttcatttcaaagaccctaaagcaaaggatattttgtattttaatctcagatttgtttgtttggaggcaatataaactgaattaaagttgaaaaagaacaaacagctctgatacatgtttgagatgagaaaaactgtgcaaatgatacctccttcccttggtttaactatgactactacagttagtaaagtgccatttcaaaactgacaatttaaagtgtaaatgtgattaccagagggtgggtaggaatggttcagaactaaagcaagaatttctgtctaataggaccaggcaatgtactgcaaaatgtttgaaaataattaacaggtaaaatacaggaggaaattgaagggaaattattctttctagtagctctttgggaaggaagcatttgcccagagtagtgctagtgtaagtctgtcatggcattagagaaatgacagtttgaatttgttattaaaagctgaagtagagacaaggtaatgcagatgaggcaatgtcttaagcaaccgggaggcagcaacatcattctcgctgtctgtggggagactctttaaagtgtgcctactctcccctcatgtgagtaatgggggggaatctctgaatttttccaagagccaccaagatgaagaaggagggagacacagtgaaaggagagtcacccaatcctggatgctttcgagtcctgctgtgctgtgtatttaactcacccattatttttgtttgtttatttgtttgtttgtttgtttgttgtttttgttttcaaaataagtataaaccatagagaatcactttgaaatattggtgtcaatatagatttggaagaagacatttgctgagaggtggactgagggaaacaacagtgacagattcccagaaggaaatgcaaatgttgaggtagtttggggagtacatataagatagacaattgccatcagatgctgttatagtaactggttggggatgatttgggggtgggggtgtctaatgtccttgcttatataacacatgagaaatctctcacaatggactgggatgtcaggctagaatatataaaccctctagaacaaaccatatgggaaagtattcatgacactgactcaggcaattatttcttagatatgacacaagagataaaagcaacagtagatcaatgaaactataccaaactagcatatttctgcacatccaaggagactgtcaatacactagaaacaacaaagaaggagaacacatttctaaactacatatctaatgatggcttattacacaaacactatcagaatatgtaagcagggcaaagtctgaacactgaccccaaataatttttaaatgattaatgccaatagccaaacttttaaaagaatataaatggctaacagttatatgaaattaaaagatctttgagaaactgcaaatgaaaaatcagtggcatatagagcatgcatgcacacacatacacacacacacacacacacacacacatagacacacagagtccataacattcatgcctgtgagtatgcctacatacacacttagtccaacaatacccatgactatgggtgagtatgcacatatacacaattagtccataatacccgtgcctgtgagtgagtatgtatatattcactcttagtcccataacatgcatgcctgtaagtatgcatacatagacacttagtctataacatgcatgcatgtatgtatgcatacatacacacttggtcacaatggttcatctacaaaatattccctcatccaagtctcagggaacattgtggaagagggaattatatataatgcaaagattataaaagccagatggtcatggggtttgttctgaaatggtatctcctaacaatatcagaggcaattcccataaagtctgaccatcaagactatccaactatgagctgaacaataatgacaccaatggacatgtcaaagttaatggggaaagctcgtgaagcctcaactctatgcaaacatctatatgcaactaaggaaagctgggagtggggctttagtcttgttcagggaagaacacgccaattcattgtccagttccaaacagtaaatcctgaaagcatgcatacaaaataagattatagagatggagtaggctttgattagtagtacacatacatatacatacacacgcacatgtatacacacacacatatatgtatgtatgtatatatatatgtgtatatatgtatatgtgtatatatgtatgtgtatatatgtagatagatagatagatagatagatagatagatagatagatagatagatgcaataacaatcaatgaaaggaaaggctgtggatttgatgaggagtggggagcagcatacaggagagtttggtcagaggaaagggaggggagaaatatagtgatataatctcagttttttttcttttttaaaggaagagagcaggtactggtgaagagtcatggtgactggcaagggtgtgtagtactggcaggaatgcagtactgccactctggaaaacagtctggagcttcctcagaacctgaaagtagaattactatgtgacccagagaccccattcctgagaatttactttaagaattgaaaccaggctctcaaatagatattggcattactctgtctgctgcagttgtgttcaatgtagtgaatatacccagggataatttagtgaagatggtatagtgtagacatgcaatagagactttttcaaccttaacagagaaagacttagtcatgaaagatggtggtattgtgggagcaatgaaagcatagttctcaggagcctgtaggtagggtaggacagggagctgatgtgcagcgggagtgccatgccagacatgcagatgaatgtgtcagagagcagctgcatagcattttatccacacttgacaatactgtgttgtgcacttaaaattttaagagcatagatcttgtgttaaatgtttataactcagtaaaatacaaccgaaaataatagatcagtcaatgaattgtttgacatttctttcagcaagtgctttggactatcttaacctaacttataaatgagagcagtatgaaaacacatctttaaaaatatatcaagaaacatagaagagtgtaattggtaatgatgttgatggtgaattccaagggcaggccagtcattcagtcagacaataattttattccggctacaagtgctattccctttgctggtgttggagctcaggtggtcaatcatttggccagtcttcaaaatgttctaggatcagtccacggtaccaagaaagctaggcctattagcacattgctataataccagcacttggggggtcgagggaggagggtcagatgttcaaagccatatttgactacagagcgaagtcaatgtgtggagtgtgtgaaatcctgtctcaaaatgccaaaaaagatacaacaatagcagtagcaaaagcaacaacaaaagcatttaaatattaaatcatctggccaataccataagtgaatgttataatacaagagtgttggtctgagcggtagtataatgttgatgatgttatttcttaatcatggtattatagcaaaacaagttgtgaaagccagggttttcataaaggagagagcctctattttagagtcattggaaactattgcagctctgaagctgatagccctctgaactactggcttcatgcgaggggttgaaaatttgtggaagtgatacaaagagctcttagattggtcaagtgcatcaaaacccttttatagatataatcccacaatgctcagtaaaagcttggcaccatcacagcatgactattatctgtccttgacagagataagtgcagaaagcagaaacaaatgccagatgagactttgccgaaatacagaggagaacttatgttgctcaagagacaatgggtgaagagaataaaacataatataataataataataaaatataatatgttttagctaatgttgtttgtaaaataatataaaaccgaactacagtggaagaagatagttcacagtggatatagagcgcagttctccccaatgcatagtaaacgaagagaggctatgtaagatctagtttacttaggagtgagatgcattaaatatgatgtgtactatgtgtagaactgcagaagcagaagtcagaaataggtttctatcttaaacctctgtagctctttctttctgagaaataagacaagtaatgtttgatcagaaaatggctacatttttagctgcagtaagggtgctgatgggtgggaggtaaaaaaaaaaaaaaaaaaaaaagatcatttctggagactcctgcaactgggagctctttgagttgttgacacatggtgatctcagtgtcccgtgtagctctgaggaacagcagtggggttttttctattctgaatctccagaaaagaccagtgactgttgctcacattttcccctgtgctgtgcagtttgttggttttatggttacttggaacatattattctcaaagccatcaggacttcccagacaggtgggtggagacaacttgaggcatcagctaggagtgggcatgatgctctctcctgaagttgcattcaggctacatggcaggttccaaagtcataggcatgtccaagtccgctgccacagccccactgaacaattccctgcccacctctgtccttggcacctgctcttctgctataaaagggctgtaagagtattttcctcagcagttgctgtggagacaataccaacaaatgtgtgcaaatcacaccgtttatgctagttggtaacttgcttcactctacttgactttacatcttttacacttctctgtgtttccctggccagagccttgagtatgagaggtgagattctttagggcaaggcctacttaggacaataatcagtggtagttctgctggggccccagtgagacaacctggtgtcttcgctccttttgtatctagtcttttcttgagtctgccattgtttttgcttgggcatgaaactgtgcctatcttctttttgctgccccatgtgtgtgtatgtatctatatgtctgtctttctttacctctatatgtctgtctctctgtctctcacattctctctctgaatatagaaacatatgatacaagtcagaagacaacctaaggtggtggactttctttaagacagggttgcttttttgtgcatactccatgctacctcgtccaaggtgggattttccaccttcattgcctctcccagaggggtacaagacactcacaggatgcatctggcttttatgtagactctggggattggagctcagttcctcatggttgcttagaagatcttttacccccagccatcttcctagtcaatacacatatttctttgtgcttcatctatatacccagcatgctctcttttctacaacacagtttttaaaagatgctcccccctaccaaccttccagaacatatgtaggatttttctgacttccttggcaatgatgattggaaaaatacacagaagaccttttaactcacttaagtgagcatatttataggaattttgatcccttctatttgatttttaataaagtaggtctcagtgctgtcatctgtttagtggctgctttgaagctgtcccgtagacaagtgctcatctgcattaggtaaatattagattttcaactatttacagctttgaggcaagtgggctcaatgcaggttgtcaagcatgtccaattattttatttttccctttgttacaacagattcaagttcatattggatagttctttgggagacacagaatgagatgagtggtgctcccctggggaatgtaactacccgagaagcagagctgatctcaggggcagcacatggatctcaagaggaattgctcattaaaactaccttcagcctacgggacacttttccttcattttgattgtagctaagatgaagcgtgcctgaccttctccttgctttgctttctttgtttctgtgtcctcccaggtttccattttaatctcctcaatttctttatcagtgatgattgttgtttggcagagggtggacactttaagcaggcagtgttgctaacgggtctctatgatattgctgtctgagggctctagtaaaagtggtagccagttttgtattcccctggaatgtttttgtggaggaggagttactgccaaagggcttccttttctgcacatatgtgtggttgttggagtgaagggtttgttttcttgctggttgtaagcttgtgtccactccaagctccttgccacatggcattccctgaagtgacaatattgggagctggctttataaatggtcagatagaacatctcttcttctcttctcttctcttctcttctcttctcttctcttctcttctcttctcttctcttctcttctcttctcttctcttctcttctctcctctcctctcctctcctctcctctcctctcctctcctctcctctcctctcctcttctcttctcttctcttctttttttttttccactttgaaatttttcctttagggagaaaatcctacctagtttgtttgaaggggctcccttgattagttagactcattgatcttaaagtgtctttgagctaatacaaagctaagtatggtatatcttaattatgtttctaaacttcctttcctgttgcaataaacaataataatcacaggactgaattacatcacatcaaagatctctccgcacagtagggagggaattacactgcttctaagcatctggaacagaaagcctgaggctgcctcaccaacctacccactagtgacaactggagtctaacagtgcatgttcaccttggaaatactaagtaatatcaaaagataagtgtgcaaaacagaaaatctcttacttccagaagtcaccattttaatgagaatgatggagcctataaaaggaaaaaacttaccatcaaatagtgaattgtggtcagtggtttagccaagtgccaactagtgaaaactggatggtgaatggaagtgtaagggtctcttcagtacttactgcagaactggaggtggctggtgagggactggagttgatccttctgaaggaatgaaagactatgcaaacaatgaatgggacctcatcaagaagcagcagtgtccctccattatgactggtaagataaaattatcacattaggttaaccaaggcgaggaacgtttatgcttttgaatatttatttatttccctttcttagagacatagtcttatatttttgggcaggcttctaactcattatgtagctgagacttgccttgaactcctgacttttctgcttccacctcccacgtcctgggattctaagtatcccaccatcaccttaagctcttgtttctaattcttatgacttgaaagctatcactttggagtgatggggaatggaactgcagaaagaggaaagtaactatgctttttctcaattttaatatgtcactaaaactctcaggaacttccaagccacacacaggacacttttctagccttccaattgtaatctattcgcttaacattcatttggcacttcctgtgtgcagagacatcctattaagtagttagcaaacattaagtcatttaattcttaaaatccctgtgtgaatcagaacctaccttatccaaaatgagaaccgagaactcatctacagtcagtaatttaaactctagagttgaaatttaaaaaggaagtgtgacctcagaggccctgagcttcttaagagcatggtcaccacctcttttcctcgaagtgcttctggatatttatttgcacaatgctatggtatgcccttgtgctttttgtgctgggtacatgcatttctgcatgctgcatatcagtcccaaagccaggcagtaagccctttggagacacagcatcagtcagccatgccttaccatcttcacagcattttatgtggaatgatgccaataaatatgtattgacttgatttaagctacaattccaccatttgcctcctcatttcttttatatctattgattatataattaatggggtggtatgtaattttcgttcaacttagcctgtaactgtaatttttatgacttttaacatgatgataaatctatgacctccctgaaaatttctcactttctaaaatatatttcacttaattaaaacagtagatggagatacttcctaaagttcttaagggggaaaaaagaggtgtttgcctcttgagttatattttaatcttgaaagatgaagttccaagatgagagagtgccatgagcttgcatagatagtactgacttcccgagagcaagatcttggcaagggcctgggcattgtttcatcattgtcaccccctttcctcccacttcctcatgaaggcagtaaagtcatcattcctctatgagagccaactacagctcacaactgcatatttgaacacatggggaacatagacagtccagtattcacctgacctaatttgtctttccatcatgtcttaatttgtctttcctgagactcaagttgaaatctgaaccacagtatgatgttaataagaagtggtaggtcatttagtaatataatgtattttaggaaatgactgggtccttctagaaggagttaaatttctccaagatcatatagtctcatatatgtgccatcccatctttgacatgtcccgtatgtgtggcatctttagcatgttcccatacgtatgccatctctgacatatccatcattatttaagatagcagacagttctcactggaaactaaacatgttagtactcttctcctgaattttctcaatgccaagactaggaacctgagtgagtctgttttcatttagaattctagcatccagcatctattacaacctaacagtgaacagcccaacacaactgcttgcctatgaaagccttgcaagtaactgtaagttcatctaaggttgcctttctcatctgttttctgttgtgataaaacctacccggggaagaaatgggtttattcggctttcaaaggtatagttcatcatggaaggaagccaagattccaagagaggtacttaagaaaggaacctgagggcaagaactaaagcagagctcatggaagaatgctgcttactggcttactctccctggcttgcttagctacctttcttaggcaacccagaaacaatttcctagggttagcactgctaaaaatgggctagcccctccattcttcatttgagattccctctttctagggttatataggtttgtgtcaagttgacaaagactgaaagttagccatcagtacttggaaactttctcgtgtctcttacaaagataatcactatgaagtgaggaataaaaagaacgttaagattaaactaacttgatttgttatgtttatgaaagttgattaatgatgaaaactcaatggcttgtggaccattagttttgatttgatcatgcagatacattatattcaaagaaataaccctcattactagacactccccaggagggcagattatagttttgtgatgatttgaataaaaactgccctcataggtttataggaagtaggcactatttgagtgtgtgatttatttttattatgagatgatcaactgagatatttgtggaaaagattagaggtatgagaggcatgatgtctgtcagtcttaacctttcactcagctgagaaatgaaagccattgctatgctccatacttcatgagggagacatgccagtttcaatcttagttaactcaaactgtgttttaaaagttgcccttattgacagtgtcttttgccttgcagaagctttgcaattttatgaggtcccatttgtcgaatctcgatcttacagcacaagccattgctgttctattcaggaatttttcccctgtacccatatctttgaggcttttccttactttctcctctataagtttcagtgtctctggttttatgtggagtttcttaatccacttagatttgaccttaggacaaggagagaggaatggatcaatttgcattcttctacatggtaactgccagttgtgccagcaccatttgttgaaaatgctgtcttttatccactggatggtttttgctcccttgtcaaagatcaagtgaccataggtgtgtgggttcatttctgggtcttcaattctattccattggtctacttgtctgttgctataccatgcagttttgatcacaattgctctgtagtacagctttaggtcaggcatggtgattccaccagagattcttttatccttgagcagagtttttgctatcctaggttttttgttattccagattaatttgcaaattgccctttctaattcattgaagaattgagttggaattttgatggggattgcattgaatctgtagattgcttttggcaagatagccatttttactatattgatcctgccaatgagcatgggagatctttccatcttctgagatcttctttaatttctttcttcagagacttgaagttcttatcgtatagatctttcacttccttagttagagtcacgccaaggtgttttatgttatttgtgactattgagaagggtgttgtttccctaaattctttctcagcctgtaaggccaccaaaagattgggaaaggatttttacctatcctaaatcaaataggggactaatatccaatgtatataaagaactcaagaaggtggactccaaaaaatcaaataaccccattaaaaatggggtgcagagctaaacaaagaattctcacctgaggaatactgaatggctgagaagcacctgaaaataaatgttcaacatccttaatcatcagggaaatgcaaatcaaaacaaccctgagattccacctcacaccagtcaaaatggctaagatcaaaaattcaggtgacagcagatgctggcatggatgtggagaaagaggaacacttctccattgttggtcggattgcaagcttgtacaaccactctggaaatcagtctggcggctcctcagaaaattggacatagtacttctggaggatcccgcaatacctctcctgggcatatatgcagaagatgttgcaaccggtaagaaggacacatgctccactatgttcatagcagccttatttataatagccagaagctggaaagaacccagatgcccctctacagaggaatggattcagaaaatgtagtacatttacacaacggagtactactcagctattaaaatgaatgaatttatgaaattcctaggcaaatggatggcatcatcctgagtgaggtaacccaaccacaaaagaactcacacaatatgtactcactgataagtggatattagcccaaaatttaggatacccaagatataagatacaatttgctaaatgcatgaaactctagaagaataaagaccaaaatgtggacactgtgccccttcttagaattgggaacaaaacacccatggaaggagttacagagacacagtttcgagctgagatgaaaggatggaccatctagagactgccatatccggggatccatccaataatcagcttccaaacgctgactccattgcatacactagcaagattttgctgaaaggacccagatatagctgtctcttgtgagactatgctggggcctagcaaacagaagtgaatgctcacagtcagcttttggataaattacagagcccccaatggaggagctagagtaagtaaccaaggagctaaagggatctgtaaccctataggtggaacaacaatataaactaaccagtaccccctggagctcgtgtctgtagctgcatgtgtatcagaagatggcttagttggccatcagtggaaagagaggcccattggtcgtgcaaactttatatgtctcagtacaggggaaagccaggccaagaagtgggactgggtgggtgggggagtgggtgggtgacttttgggatagcattggaaatgtaaatgaaataaatacctaaaaaaaaaaagtttcccttagttaatgcaaatcacaatttattgtccaacaacaaaagcatcaaaaccaaaagtaacatgtaatacgtaacagtccagctttgactctttttagatatgtcagatatgataaaccaggagaagagctttgaaaaccccagaccagatctaaactggacacatgtctaagctttgggttggggccatggagacattcctaccaatcccatgtcatactgctgtagattctctgagagttaagcaacttcttggctattttctccatatataacatatcacttttgcacatacatcttcagaatattgccaagatgtcaatatttagagtttgagacatataaataacaagaatcatttgaaaactggagtcatatttggaaagtcacagcagaaggtctgccacacatgtgtatgaataaccaggttgagattttaatgtgtagcactgataactggtcagaaaaatttaagatgccaagttaagccttagtgctcttttctctagcaaattctgttagttttccctctaaaatgcctctcagagaatgctccatagcctattgccacccatcccccaccttgctataggcccttaggtagttttatatgagagaatatggcaacagcttctaagccagtctctttatgttgacattttataaaaagattaattcatgttaattgtatttgtctacatgttttgcctgcatgtatgaatatgcaccatgggcatacctggtactcatggaggtcagaagagaacatcagattccttgaagctggacttaggggtggttgtgagctgtaatgtgggctctggaaaatggacccaggccctttacaagacaagcaagcactcctcacgctctgaaccttaactctagccccacttggcaatgctgacacccactgagactatcaattgtatttattaatttaccagggagaatataccagaatgtcccttgtcttgaatcacccttataattttctttagtatttgatgccaacttccaaactagccaaatactgcaaattggtattaattagaaaaaattaaagaaagtatctttcaaaactttatttttagacctggtatcttaaattttactattatcatgctctatatagtaaatataatatccatagtttaaatagaattcctactataccacaaataaagcaataatttatgttataattatatttattagcattgtgatttttcccaatacaaatatatctgtttcaatacctaactgtagttggaaaaaccataaaaattcccgagtcttaccatctgaactgatttgaaaacatctgtgctactggaaatgaactcacttaggctaaaatgtttattgaactaaactatgttcaatcgataaatgaacgcatctcagagctggaagtgtatttttcagatagggttcagaatccagaggaggaatgaggttaggtatagtaagtcagtgaaaccagacccagactggcagctacagagtcggagttgagcagaaccacacacggacttaaaacgcagccgccgccaaaagccataaagcaaagatagatggaggcagtagaaacaaatgggtcccaaaacacccgagcaatattttcaaaacgccaatgaagaaaagcagtttttctagccatctcatcaaaatgggcttcagtccaagctttattcccgctttgaaaaaaaaggaaagggtcaggagaaattttagttctttatggaggtagctgtgataacaggagggttgggggacagacgggagcggtagctgtcagagtggtagctgtggtaatgtaaagtgtttgtggggacatggaccttcaggtgtgtgtaaggcaggctggcctcaagaatggcttgaagtgctgtctacttccacagtaagtcagagaaatcattgtgtaaatcctacacagaaaaccaatagttaaccccttagaaaagaagagcttccataaaggaaggcttttaaaatcaaccccctggaagttgggcaccggttatgaatgagtggctctcggaaaaagaaaattgtaaagatccaggaaagaagaagactccatctcagagaatggctgagtaaaatcagttagattttctcacctctgagagaagctccacttaaaaatacataatagcatccactgcttctcagaatgtgcaaacatgttgggactcatatttattgctgagcaatttggctgtttcagtagatgttgagattacacatagcattttacaaagggctccaaatctattttatacatacatctattcatatatatgtaaatctacacaacacacacacatactgcagctctatagttgaaataaaattaattttgtgtactggggacaagttgaataagctgctgtatgtataccaggattgttatgatgcaattattaagaattgtatgtgtctgccaaggatgattacacatgatgttacttacacatgtaagttagccagtcacaaaaaatagagggggcgaattagatgactttcagtgaattactttaggaaagagttcattaatatttagattgaaaatcatttaaataaacaagaactgtacaccattactgtgctgtttcacgttgttgtcaagtatgtgtatatgatacacatgtggaatacgtagaaatagcttacatatcatttaaactaataatatactgagcaagtactttaaagaacttaattatattaatatattactgcttatttaaaaattacatatttaaaatgtattcatatttggtatttcaaactaacatttatgaaatttttctaaagacttttagattttccattttgaccattttgctttatttaaggagagaaagaacaagggttagactacttgttgtctaaatatatttccccatcttttatccaaaactacaaaggctgataattgatttaagacatacaggtagcagcctcagaatattcactgcagttagagccccatcactccctgccctgggtatgaagatactggtgtatttgaagctctgagttgatcatctcagagttcataaaatacttagtagattttggcagtgtttgcctgagactttgtaaaagaagaaacatgtaaatgaagtcaatgttgcagacctttgggacccattacagccagagatgctcttcccatgtaattagtcaggactgttaatcatgtttgacaagtattgagtaatgagctgaggcagggtgtgtgctgtgaccacactcttccctgatctggttaggcaaccccatgtctatcagcttccctggacacacagaactttaagttaacatcctgttttcctgccacccccatcagcctcatgatcattaatgatggttgaattggccttgaacaattgcaccaggaatctgacccagagtctggcagtactctcaatgactgtgtgttctttacattatgttcgattttctgtgccatctttgctctgccaggcctgtgtctgtttcggtagatgataaggcaaatagactcatccgctgttctgaggctctccttatccctttacaagtttccccagtgccaggtcagtacaaggactgagtggtgacttatctgtcagctaattttgctttgtcgttcagtagttgccgacttgcttttttttttttttactgaatatacgttttatggtagtagctaacaatttatcctgtccatttttacttacataatgtgacagattaagtatctaccctctgtcattcagcccttttcctgatgttgaactgatggatagtcccaggattcctgggaactcttaactgtctttcctggcacttgtacacacctaggagaatcactcttcggtgggaactggaaaactgccctcaacctcttagccaaattgctcacaccacccttctggtgcatagcccaactgctagtaagggcttgtttgtttgttatttgtttgttttcattttccaatggttggaaagagtcaaaagatgaagcatacttctcaataactggaaattatgtggaatatacattttagtatatacaaataaacttgtattagaactcagtcatgccccatgtatgcattattggtttctgcttgtgcacaatcatggccatcttgagttggtataagagactacaagaatttcaaatccctaactatttatgttttgttcttttatagataatttctaattttttcttgtttattttttctgtactttggcattttgcctacatttatatctcttatgtgagagtgtcagatcccttggaacaggagttacagacagtggtgagaattgaaccctggtcctctagaagagttgccagtgctcttaactgctaacccatctctgcagcccccctttatagataattttctgcttctttatctgctggtctcagaggcaattgagaaatattatttctgtatcacagcatttaaaaatttaagtaatctatcaaatgtccatttatatgttaaatttctttaatattatgtttcttttctattatcaaaactgacttttttctagagagttcagtgtaacatggtttaatttcttttgtcctaagattacaattgagttaaccattttcacatatgttgattggttctcaatgtttattttactctattttatcaagtatattatattcccttaaatgttttaattaataaacaaagaggaagttagtatatatcaaatatctgtacagatgctagattccatgattaaaatgatgcataacactacactccttcctccctctctcccatatgtatgtaaaatataagtatatatagtcatatgtaaataatatataattaataatatataatataattgtaatatataaataatatataatataatttcttaggtattaatactacttatagattagagaggcttacagattatatcaactacatttatgtagctgagccattagagtcctgtctttaagtttttattaatcacctaattacttattaatcaaacaactaattaatcttgcatttcagacagaagaatgatagatcagcatgtcactgctgagctatacgtccatcccagacacatggtcttgttaatgtacatctctgctctccattctatgaagacaaatgtataatggctttgtcaagcatattgatctgtaaacttggtttctagaacatgaatattatcatgtatccaagcagattcaaaggaaataattggactttgttttggggctaaatcccttatcatttagtactttaggagaaccaatggaggctaggcaatcattttatgataacataccctgcaaagcacagtggagtaaagtttgtctgttattgtagccaaaccctcaattttaccttctagttctaaaactaattttctgtgtaactgacattggaaaaattattttacatcatcgagtatcattttccttatcccttaagcgtgattaataatactgtgagagattaaaagagatacttttaagcattgtgcagtacaggccccagtacatagtaaccttaaaaacacttgtatccctgctgaaagttgtgaattattcagctgggctttctcctgaacagggagctagaccttccatgggcatttctcaaactgtgatctgtagtctgtcaacaatggggtacctagttattcagttatgctgaacatttctggacttgggatcctaggaatggccacttccagcagtttctagatgacgtgggagaagattgattgttaaaaattattaaactatcaacatctatgacttcctgtctattcaaaacccaaaactacttgtaaagatatcttcctttggaagccagttgaatagtttaaagcatactagggtaaataaataacatcatttctatatgtgagtcaacccctcttacaagaattgtgtactcacctccaggctgctgacagagatgcctttcttgtcacagtccgtataacactgtatgcttggtggcagtgttctccctttaatctcttttattttagctgttaaatgtgctatgatgccatccagtctttgcatgagatatactgtgttaattcaggaatagtttcctgaaacagtgtttgatataggtattagctctcaccagtccctgactggacttcatgtattttcttggcttagaaacaggtaataggaggcctcttaggagagacctgagagtaattgtcattggatggggagatggctcagttggtaaggcgcttccctcccaagcatgaggaccacagttgagatttcctgtgcctatttaaatgataggtgtggtgggtattggttgttttaccatcggagatgtagagataggcagattcctgggactccctagatagccagcccagtcaaactggtgagatcccttaagagaccccctttcaaaaaaaatacagagcaatggaggaagacagccaacattgacctctggttttcatgtacattcagatgcacacgtatgtgtacttacacaatcagacaacacacacacacatatatatgtacacacacacacacacacacacacacacacacacatatatatatatatatatatatatatatatatatatatatatatatatatatacatacattgattggcttataattgccttgatcattgtattttcacttcaaggtctcagccatcttgagcctagaactgatgtgacttctgttccctaccatttgtgaggacgttcagctcctgccatgttcttcaactttagctcttgcctttgactccctccagggctgtgatctagaccactggttcttcaaggaggcttcctagtgcaaaggcattaacagtatcagcctacttgtttgaactgccaattctccacagagttcttgggtaggtggtggtggggtgaggggtagtgctaccctttgattttagcacactctcctcgagacacagctagactctccaggttgctctcagaagcttctctggctttacctatttcctgcccagcaggtctttgttgtttttctcaaagctatgggacctgaagagattgctcagtgattaggagcactgactgctacttcaaaggtcttgagctcaattccctgcagtcatatggtggctcactaccatctgtaatggaatccaatgccctcttatgatgtgtctgaacagaaagatggtgtacttacatgcataaattaaaaatataaatcataaaaatatcatggccacactttttttttttttttgtatttgagtagtatctatttcccagccagctttgtacttaagatttttttttttttttgcaatgcatctctgagcatgcaacagcgcaattcttggcatgtggcagatattaaataaatatttaagcaaatggatgagtgaacactcagttaatagaaagtgactgaggttgtatttcttctgatcttcactttttttgcttgtttgctgtttcgttattgatgtagacatccacacactaccagtttcataactaatttatcaccagtttatagaaataacttataagctacgtgaatgagggagaggaagggaggtgcagagaggagagggagccccctgcagttaacttattctatagctctcagatcctgtggcaatgactaccattatagacattgtagtttcagaagagacagcttgtaattcatctagcatgttcagagtgaggagctaacgtgttagatcagggtcaggcagccaggaatggaatttgcatgcaccttctttactgagctcttcaactccaccagcggagtcatcccaactgtctgagatgctcccttgctgaggttatcggtagggaagccacctcctggttctgcctttccctctgcagcagcatctcctctcactctgttccctgcttactcatggctggtggtcttgttcatcaccaagctcatgtgcacagttcctgaacacatgcactttacaatgcttttctcatctgcttcctgcattccctctcccttttgttcagaatgttttcttaaggcctggacataattctgtgctctcagtatccaacaaaaggtatttagagttaaagtagacttttctattactatcaggacagcaaagtttctgtgtggttttaacttagtgtcacactgaaacaccttacatcttagcaggacaggattagaaacaaggtgaactataagccacagaggcctgtctccagtgacataatatacaactgtgctttctgcatcaaagattctacagcctctgaggagagaaccaatgttggggaccaagtgtccaacatgagagtgtgtgtttgtttatgtgcaattatgcctgcatgcaattatgtgtggtatgtgagtgagtgtgtgtatgtgtgctttgtgtatgaatatgtgtgtatatgtgtgtatgtatgtatgtgtttgtacatgtgtgtatatttgtatgtatgcatgtgtatatgtttatgcatgtgtatatgtgtttgtatgtacatgtgtgtatgtgtgtgctgtgtgtatgaatatgtgtgtatatgtgtttatgtgtatgtacatgtatgtatgtatgtatgtatgtgtctatgtgtttgtatatatgtgtgtgtgtgtatgtgtgtagttgggcagataggacattttacattccaagtgactcacacatcccctgtcacatgagcatacctgagagaggttttactttctatgatctagagttagtcaatctatactatggagataatccctcttacagacatggttgtgagtcaaaagtgaagattcccagatgcctttgttgtccactggtgcctgatactgaatacaattacagttattgaagtggagactattggaaagctatagagggagggagattaatgcaaaggtcaagtcaaactagatttgaatcttggcaggcaaagaaagatgtacatagtgaaacacattggggaaccaatgtagaactggctgtagtgttttgttcttgcatgtgattgagaaagtaactgtaattttgctgttaaaaatcataatgtaatttttttgatggttttaggcaaccaacgtgaaagggtcatttgaccctgaaaggcatagcaatcacaggttgagaactgttgtactagagaattcagtattgccacttctccaagctcaagcatgccagcaacaagacatctatagcctttgtatgttgccccaaataacataatgtctgaggcttattgaaatgattttgagttttataatggctgactgacatattttgtcataacctaaagcaaaattttaagttctgtacaaaatagaccaacaccctctctgtcatttgttatgtagaaaacaaacagcattcagttgaaagacacagcccagaaagatcaggcagctcactgccagcgggttcagaatgcattatacacagtaattaccaatggccccgtaaaccccacagtgtttggcaaactcctcaatgtttttgtaaatgactttgttccctagaattctgtactgccctcatgtagcagtagggttattgtcctcctggacacattaagtggattattttcttagtcaggggagagaaggtcatgaaaaataatgtgcagttttcccccacagcaaatgctgagctctttaataatgttcaagtggagaagagaatgaagaatagcttttccttcttaatagaaatcaatcatgatatggagtaaactggaaccgacagaaggctttcctagctcataaaggatgctggcatcagtgttgtgaatggcgcagtactttggagcttttgccccaagaattccttcatggccatataaatataaaacccattttatttacatgtctggagctgatgcataccccgtcatttcttgccaacttagtccctttgaatgacatttggcattctacctaactaagcttcctgcctgccccttgattctagaatcaataaaggaaagaatggtggatacattttacaaagacaaaatttttgagtctaccctctgattacttcatgttgagaagagataggtcttgattctatgtttggagagatccatatgagaaaaaaccataaggttgtatgataagctgcttaatatttgaaaaattaattttaagatcttgaaccctctgtattacttaatggttaattccaaggcaatcatttagtttactaagttgtattattgaagtgaaataaaagctatggtgttcatcttacatatgaaaaaaattgactatactacttttatacaattcatgaatagtagccaatatgtatttaaagaaattgctatcaaaatgtgttatacatatgtcacctgtttataaaaataaatacatgatctgaaaactttagacatttatcttttttcaatgaagcatttaaaatgcattcttgccttttccccctagacccttgtaaacatttactgatggttacatgaaagggattaaattaactcctgtcagtcttgaatataaaaacgcccaacatagccagctaggttgtcttcgtttcttaatgtagactgtctgcgctttggtcctctgtataactccttagagcttatagttattttaaactactttccatgatgccaatctcctgccagtctctcaaggaacatcccctaggtctgttggagatgccatatctacttgcctcttccaaaatgttgctgccaaaaagtcgggtaaaacatgatgtcatgtttactttctcctcgtccgcatgcacgcagctaaacagcagattctcagtactctgaattagacttcattttgaactttgtattttggattgtaaaataattaagtatgtttgtgagatatagcataatacgccatacatgttcactatgtggaatgcttacaggatgactgatgaatctcagacttaatttgctttgttgaaaacagatttgttgtttgaaatacacaaagcattcacatagtcaccatttctacagcaaagctcatgaaagcttgttcatgtctgatctacaggatccacatcttctcttttcccatcccctccctccccagcctttggtaataaccattctaatagctccttctataagtttgattttgttagattcaacctatagatgaaattatatttgcctttctatggatggcttatttcactaaatgttcatccattcagtgacagattcatagtcacaaatgccaatatgtgtcactgcttttggggttgtgtaatagtccatgatttattgttgtaaacgtgttccctcaccattcgtctgatgatggacactcagtatctccttgtcttaggtcatagtgcagaatgagcattggatgaagatacagctttcatatattaatgcagtttcttacaatatgtctacaaaagtggattcatgttcctcatataagtctgtcttcagttttctaaggaatctccacagtagttttcagaatgaccataatatcttgttttcccaacaatgtgtatggtttccttctctgcatcattgcctcccagtgtcttatgggtagaagccatttaatcaatgtgggtaatatccccttgtggttgcagtgtgcatctcttgatgcacaatgatgctgggatttgtcgtgtatctgctccctattcatgtgctcatttggagaaacttacatggaggttacatacccattccgtactgattgcattacttccttctatgtgcttcttgcagtttggagctgagctacgcctttcaaatactttttcccatctgtgtttcatctctcctctttactagctttatctttgctccaagaagatgcttggctctgatgctactccattcattgttacttttgctatttgtggttttggcatgaaaactaagtcatttttcccacgagatcaatgcagttgtctcatctagatgttctatgtaagtgctcagtctattttaactttattttatgtttggaaatgagatgacatgggtcagttttattcttttcttttcactaggctggaatatctgacagaaacagcttaagagagcatggatttattttcttttctctgtgatggcaggggcagcttgaagctgtagttgtgagtgcaagaggtgcttgttccaaggagaaaggagagagcctgggctggaatcgtggccaggctggaatccataaggcccacttcacagctacccacttcttctatttaggctccacctcctgaagactcctccaccttcctaaaagcaccgtctggagaccaggcatcaaaatacctgagcctcacggggatatttcactttgaactgtagtagggtccaacctcattctacttccgaattatcagtttccacacacatttgttgaagagattgtctattctcaattttgtgttctgtgactgacatttatctatcagccatccaaacatccatccatccatccatccatccatccatccatccatccatttcttccatccatccatccatccatccatccatccatccatccatccatccatccatccaaacatccatccacctttgtcaacttagtaaaaattagagttatttctgaagaaggaagctcatttgagaaaatgacccaaccagactggcctgtgggcaaacttttcggaccttttattgattaatgattgatatggaaaggcctgttttgctgtgggtggtaccctccctgggaaactgttgtataaagaaatcaggctgagcatgccctggagagcaagccagtgagcagtgcccatccatggtctcaggttcagtttctgcctccgagttcttgccttggggttcccagtgctgggttatgaactgagaggtataagccaaataaactctttcttcttccaaattgcttttctatccctgtgcttatcaaagcaacagacacttcaattaagaacagatgccttgtaataaattaattgcccaaaaccctttgaatgtatctcttggttttctaccctagtgccaatatcttgttgcttcaattactatagctttgcaatagattttgtagtcatatagttatatgtcgctagctctgtctcctccccaagttttgttgtttttattgactatggccttttatttttctgtacgtgttttatgcatttttaagatttttttccagttccactttttcattagtagtgacttggagattgtggtaattatttcactgaatttgtagattacattggataatatggatatttaaataccatttattgcaagacagcagtcctttatatttctatgatctacaattttttatgaattttaaccttttaaaaatttagatgttttaccttattgttatcatatatagaattattgatttatctttcacatagtttattgtgaatatacataaatgcttccaggattacaggatgactttgttaatttcagcattattgaatttgcttctcagttaagacagtttttatttatatgtgagatgaggtcatgttatgttgtccctactgtactttgacgtaatattcttgccttaatttttcatgtggctagaatcatggattaaaaaaactagtgttcagctatagtctagtttctttggtggaatacaagtttctgcatgtaaaatcatgatatcaacagacagaagtaataattacttttctctcctatttttgattcttttatttccttttctgatattccaatctagatttattatttcttgtgttcaagtgttttgcctatatttatgcatgtgtaccacagcatgcctgatgtaattgtaggccagaacaaggtgtttgatcccctgaaactgaagttacagatggcttgaggtcatatttgcctgctggaaaccaaacccaggtcctctgtaagtccaacaacagctcttcactgctgagccactattccagccccaattattctgacctaaacttccagtgttatgcatgctcaatagaaacataagatgcccattctcttattcctgagcttttatcatcttaggagtggcatagatggattttattgtattgggatatattctttctgtgtctgctttattgaaaacaatttttaatcgtgcaaggatattgaattctgtcagtgcttttcctacatctcttgaaatgatgacatgaagcacagtataaatggatttgcataaaatgaataatccttacattccatagggtaaatgtttttaaaacatgaagttcatttttcatcttgtgtatgtatatgtgtgtctgggccctgagttgtaggtactggagagagcaaaggaggaaatactctagaactggagctcccggcaggtgtgacccatgtggcatggatactgggatcaaacttgggtccttctggaagagaaatgcaggcttttaactacagagcaatctctcagcctctagggctattcttgcttggttacaacgtatcagtgttgtgaattcagttttctaaagatttgctaaggattttttacatctatctgccgtcatgttttttctgttttgtctttggacaactttggtactggcgcgatgctggctttgtaaatgtaagtttcgaagtattttcctaaagtttatcttttgggaggagtctgaggaaagttagtattagttttaaatgcttggcagaaccctttagacaagtcagctagctcagggacttactttgctattgactcatcttctaacttatcacaggttggttcggagtgtctcttccttctttgttcaggtaggttatatgttgataaatgtccatttctaatagattatctgatctgttagagtgtaattgttaagagtcacctacaatctgttttatttctatggtattactcctgttgcctcttctttccaattttaattttttctcctcttttataattattctgactgaagagcagttgacttgggttatattttcaaagaaaagctgaatgcctccaacagttggagacatttttataatattgctttaagcaggctttcttctcatcacccctgtcattccctggggactttcatacccatactgtgtgtgtgtgtgtgtgtgtgtgtgtgtgtgtgtgtgtgtgtgtgtgtgtgtgtgtgttgttgggtggtgctgcacacatccatagtcctccttcacctttgttccaacttattcttcttccagcttgctgattgacatgtcctgctttcttctctgcttattctttcacatgactgtgtctactattaaaataccctattgaagtttatttttgccctttactatattctacagctggggaatctctctagtcctttatcatacttctgttttgttatcaggttcataattttacacatgtattattttcatgatgtaatttacctgttcacatgtaatttcttagaattccttctatggacaggaatgcttgcacatctgacctatagagcctcttttctctccctcttttttcccttcctttctgtttgtttgttttatttttgtttgttttatatttttctatcaaatggccttttattgaaatgtcttctcttatcactcctcaaatcgctggatattccactgtaccaatgatggtgttatttatgatatcatgagatggcaggactcacattgcagaccacagactgtgtagtattcaggatctccttaacagttctagaataatctctagccaaaaaccaatgctgcatttgatggcagtgctgacaatctcatcaaaagtgacatcaccattgtgcttaatgctctgcttctatccgactttgggcttcttgagggctttgatgattaggccaacgcagagggcaccacctcattggaacatgtctgttcagactgcttaatttcactgcaatctgagctttctagtcacttattaccttggcaatgacatcatcaacttcattttggagacagacccaggggacctctcttgggagccaaggcagatgtggcatcaacctcactttagttgtacctcaggttcctgactttgtgggcagcaaggtagagaccactggaatttgggagcctggatttgagatgagtggagaacattttccaccatcgccttcccaagccaaaaactgaaaggcaaaaaagctggatgctttcctgccattgatttttccactactttttagaattattaagaattaatatggtacttttgctgttatttgttcatttttttgttgttcagatttaccctgatttgaagttgaacttagaagcttgcttcatatttaaggctctttaatctgttaaactgatagattatctctgattcttttgaaacataatgaataatctttataatgtttcatatattcactgaggagaaaagctggagaaatagaagtttagtactgtataggatgaactaagattaagattactaaacacattgctttgttgggaaaaccagaggttttatattattagcatattttgatgttgatataactgcttatttgttttacttcagaaataaattgttttgaaggataaatatctaatatatatgtatatgtattatttctaatatatatttttttcaaacacattctctgataatgggaattgatcttccttctgaggtcagatgccagggtagaactgaatcaatattaaagtcatatttttccaatttatatagtatcaataacgccattagatcttaggaaatgccaaattgataaacagatgaccatttggcccagatggatgacttcactttacactatcagtttctctcagatcaacccttggccttccttttcatccatggccttgcctgactaaatcttttttatgttccactatattgtgactcttccttgaacctatttcacatttactatctttgatccttaataatcctcaactgttcttccttttgtaaatcccaactcattggattgtccatgtagtagactggtacgctatgcattttctatgaaacacagctaccatttaatacagtaggcaagtctggattgagagttacaggagctgtttcaagatgttctttatttggaataaaaaataaaataaaatactcaggttggaagccaagtttgccctcattttaaaattcattctcagtggaggaactctgtgggaacttgacagcatgtccaagacacttagttgacttgaacacaatgacttagaatgtaatgaacatagcttccttgaagtgaatgtttttagaataaatgtgcagtgttttgcaggaagatgccgttgaagacttgaaatctttcctcttggtgttcttgaaaatgaggcgtgtgctgcccttggtagtctgtctctttagcttgagactggctgactcacagcaggttcagcatgtcccagggctgcttctgtggaacttgatgccaatcaagaattcactaagggaaagagaaatgctgttatatgtgtgcttgtgcttacttacacacaactatttgtgtttctgtatgtatgctgcccttgacccttttttcttgactcagaagtttcagaagtcttcttagattcagtccacatacatttgaagggctttttaaaaggtggagtcacttgcctatcttcacatgtacactggtgtgtaggaggcagcccctgcagcagcagaaacagtgacaatctctcagtatctcatattattaggcttcctcaacataaatgtctttaaagccaataattaaaatgtaaaggggtaagtagttaaataaaataggaggagatttgtgtcagtcatgtgattcttaataatagtctcttattttactagtaacaagattgcttgggtatatgcaaatgtatagatgtagataccttaagcagcaaaggaaggaaggaaggaaggaaggagggaaagaaggaaggaaggaaggaaggaaggaaggaaggaaggaaggaagagagggagggagggacggagggacggagggacgagggacagagggagggacagagacagaagggaaaaagttgattccctatcagctagtgggataagggtgatctgggggcatgtacagcaagcagaatccactgaaggctactgacaggaaggtggtattaaaagccttgtgaggacaccataattcaaactattctgcagttctagacagacagacagacagagaaagagagaaagaaagagagacagtgaaagacacagagtcagacaggagagagagacaggggtggggatttagttgacttaaattgtgaagtacacttgatacttggttttgcccgggacacatttgaactaaacagctgctaacaacacaaagcagggtttctggatacttgatacttccatgagaaatagagaatgatgtggcatggaccctggacacagcaacacaaatgtatacttccacgtctttctcagatgcgctttctcgatagtatctgacggcgactgcgaaatgaaagcgcatattgaaattgatctttacatgaaaatgattaactcgatccacaaaacatacagtaaaagcaaacgataaagaaaggaagctaataaacaaaattgatttatttgaagttctgtgcctctcctttactttcctgcaagctgcaggacagaattagtgacagagttggctccagcagtctgcccaggctgctgtaataggtttcagccataccctgcattattgtgttttatacaaagaggaggaaaaaacacatttgagtttgcatgtaggagaacctagttcttatagttaggagattacagttaggagattttaaaaggaaagcattcctgataggatgaaaggagccccattctattttatttatattaccaaaagaaatatttattaaggacacatttttttaaagtggtaaactagagtagtgtaagatacttgtaattcataattcgcttgtattgattttacacatttaatattcttgactaggtaagttgccagtacagatttttaggtataagtcgctcttaaagaattccttgccactacatggctctgtaagtgtcatctgttgtccttgctccctgagccctctgtagttaactatcttcacttttcaacatggcatcttaagtattgctagagatgcttaagtaccagtgcccttggtgctccagtcacagatatacacatttatttccagacatggttctgggtgattctctagagtggacattaaatacagcagaggtcagggtttgtgaaagcaaacccaagcatcttcaggttgtgaaataagtttttaaaactgcccgaagaccaaccttctaaattgctttcctcttcgtcggcctatgtggctataactctgctttctcacgctgtcatttcaatgccccctttcctgtttttgtctacctaggcttttgtcttgaaaggaagtaagtgcctcttgaggaagtcttaatggtaagctcccattctgctctgtgtagatgagagtgtctcctttgtgtgctaaagcagcgattctctctaaaccattgcatggtgctacagatacctgcaaaatcagaacagagctctgggcaagagcatccctaaacaaaggtggtccttgaaagcaggtaattgctccatgtgttgatatgacagtgagtgaatcttaccaagacactcagtcacagagccattcttttcattccatcgactgaacatcctctccataccatataccatggttaccaatgaagagtcagtgaagctccccagccttcagggaactgaagctcttgttttgttttagcctctttatagtccttggagctcatgctgttttactaaaggtaaaatattcttccttcaaaatcaaatgttttgctctgaaatttaggtaatctgacgatatgaatctgtcagaaatatgtcgtatattattattggaagagggatttagtgggtggggcaaattgctaatcacttttacaaatgaagtttgtttttgtccactatcttagccactagaggccttgggcagtctgtagaactgatgtcctctttaagggacactatagggccaaattgtgtagttttgccaaagataatagttgtacctaatgtttatagtaatggcgatcgtgatcagaaaacttgagcaaggtaaatggaggccacaggagagtgtgagcagccttgtggtgtcatggttgacttctgtcacagcatgctccttggaaaacttcctctctttttttgcaactgattgcaagttattcttagatttagagaagaaaacaaagcctttgaatgacaagaccaaatgcactttaccactgttgtgaatacagcttgatgtggatgtccagggattttctttttcattgaaaacccttctttaagtagaatgcaagatgctaaagatcaggagataggaggagtcagagtgctgtgggaaacaatagccccttaataagactcttggtaatcaggcaggcgtttgtgtctgtagttagggatggggagggacaggctgaccattctgaaggttgccatcatcacagactggcacatttctaattacacaagaaatgagaggcttcagaaaagaaatggccacagcactcagccacttgggcagcatctgattaaggccagcaagccttggaaggagcagtctatgacattgcgcttatctaaaatctttttccagactcatttgaactcccttttactcatcatttccctttgtcttttctatccatctaccttttctagtacacagattcttgatttctcagggagagtccaggtgagaaacccagtaccaaggatttacgagaagatagctttattagtaacactctcatttttttgtgtgtatcatctagaccatgctgacatgcttcctccatgctgagcaaatgctccatcactgagctacaccctccacccaggggaagaatcaaaagtatcagaagggttcagggagctgaaactgtagaaagacactgtatatttgcctggaagagaaccagacccaactttccagtggagtctggaaaatgaaggccacctaagggctgacctttactaagaggtcctaagaaggtcatagaaaaggagaaaaatccctttcttctctccttccttggctctaccttgtagctgatgactcctgtttcctggacctaagcaaaagtctggggaaaaggagtctgaaaacctgaagctgagtgtggtgatgttacctggtcactcagcactggcagaggggcaaagagtattgtcagcttcaggcttgtctgagtcacatattcagattctgtttctaaagaaataaaatactttgctagtgtgaacagaaataaaactctagcaatttactctaaaaatcttttctggccttatctgattttcaagctttgattcactcctttattccagcaaataggaaggttcctgaggcctgagggaaatagttgctttttctttcctctctttctctctctgtcctgtctttgtctctttctctctgtctctctatctctccctttctctatttgttttgtcctggttttgtttgtttttaatttatcttatcttgctatatttttgtttctttttcaagatggaatttctctgtgtagccatggctgtcctggaactcactctatagacttggctgtcctggaactccaagatctgcctgcctctagagtgctaggattaaaggtgtatgtcaccacttcctctaaatagttgcttttatcctcaagaagaggctaaagaaagcagggagaagaaaaaccaataattcaagacattatagtttatttcaaagttacttcttcataaggggtgggcagattggtaaaaagaagaaagaaatcacctctccttggtgtagggtgaccctgggtctttatctttggagctggcctactgcaaacttggttgtctcactaatcctgatttatcccattggtcatgtatttccagttcagcccctccccttcacgcgacctgagcactagtcagtccattttggcttttttttctgtgctcctgtggagttctagtgcaggagcttaatccaaagttctgtccttgtaagtctttaaattactacagggtgaaacatgcatcttgcctcaggtggggaaaacccagctaacctacctttccagttcatggaaccacgagagaaacctcacatgcttcatgccagcaaattgacttggctttgatctcaacatacagaactaagggtttcactaaaatggagttttatgcagcttccacagggacggcaaaaatagctgcaaaagacaatatccttggtcataggtagagcgttcaaacattgcactagtaagagctttctgaatcagctgctcaggaaaggccggccatgcgaatgataggatttatgtggtaacagggagcagagtgtggagtaggctatggactgtttaaccccagccctctgtaaagccagtggttgctatgcagccaaggggaatacggccctagcacattctcagccccctttacccctcctgccccaacctctttctcttctcttaccagagaaacattgcaactgtttggtttttgcttttgtttataatggaaaatgacatcctctcatatttacatgttgacggtcactgctttttaaagaccaagtttggattaaatgctccctcatggagtttgagatttccacccaaggttatcagtctcctctgctacactttttaacaggttttgtgggtgttgttgttttgttttgtttttgtctttttggtttttttgttttcaagatatgataattgtagagggtaattttgtgacagatgagaaccttttctttaagagtggttctcatgccatgtccctggccagtctcctgtgtaatttctgctgtcagggttttctgtctcctgttctggccacagtctttatctgtctcctttctttttcatgcctcccatgggaggctgtctccttccccacttcctggttcaatatttaaaggcaccacttgaaatctcatcctgaagaattccaattaatgctgtgctctgttgcaactcctatcctagacctggcttttctgtaatcatgtgacccactaagacatccactcctctctaaagaacttttctctcagccagagcattgctattgtccaggaccagccagctccctcgtggctcacttatgtaaggcgcacctttgttctcttcctgtaatagaaccaactgtctcagactagttcctgaaggtgggcagcgaaagggtatgatgaactacagaaatgggatttctacaaaagaaactttaaactctgtggagtgcagtaagaggtgacactttagacagcttgccaagctgtgcctcacaaaaaccttttcttttagaagacattaaaaaagaaagaaagtattatgtatgatagctgatgaggtaggagctggttttaaggctaaaaggtgattataatcatccacacagctattgaaagtggtgtcctactttgtatttttgtttattataggctggaaggaggtaaattacaaactcattgtcagtcaataatcattttccaggaaaaaggtaatctatcctctgaaaggcaatattcacccgctcacctttcctgattgcttcattgtgtatgtgattgctagattgcccactggccagcagagaggtgcttccaccctctggatcccaggggtacgagtcagaagacacatgatcactgtggtgccctttctcttggttacagtgacaggcagccactttcctagatggttcttagctttgcccccatgagctcaactttgggggaaagaactgcacgtgcttcagcagagggctggggacggggaaagggaggagtcatcataaaaaaagttagatgatcctggcagagaaaacaacagagaggaagaaagcaaaggacagagcagggaggaaggagaaggaaggcatgctatgtctaaaaagctgagtttaatccaggcgctctgaaaccacgaaaccattctgattcgttgactataaatgaaatgcctgaagatggacttttgctttttggacatttatttaggtcttgctaagcaaattgttataacaactcccacccacctcccttctcccccctccccaaaaaataccgagaaagtgcatttttaccctaaaagggccgattgtctgctcccacatggttaattagcttccctcttaggaagcactcatggtacagttttattctgttgttcagtctttgtcccttttatcatttctgattattaaaattgtcatatatatttatatacacacatatatttatggaaatgtttcttattcatattatcttaaggccttttttgcagcatagttaaactttactgattctctcgtcccagaatatagattatttccaccaatcttgcttgtaaatattttcttatttaactttcatgaaattaaatagatcaattctaggtacctgatttctcctaagttaaatttgacttactcagttctgttatattttctaccatatcaagtatgtaatttatgaagaagtatcctatatctcagagaaactacaactgcacaagaccattgtgtccaaatcgtattgtgttctattagtgcatagaacaggcgtgtgcctcatttaaggggactgactgtatggcactggagcatctgtgagtggccttgctcgtggcctctggcaacaagtaacagtgtccacttcttcctcaaatttcctacaactctcagtccattttctctcttcctgctcaagatctgacttgccgcctgtggacctggccaccagcttctaccctctcagccgtggctagaattctgagcatggcagctatcagtggttatttctctgtggttgttttctctttcctcgctggcagtgaccctttgagatttaagagaagaggctgtggaaattgttgactcaaataaaatgggcagacatccttaggttctaattagctatactttccaattcagagagtcgatatggttagtgccagactataatgtgggttcttgaaatgcatattgagagagtgccatgaaaatgtgccactgaggtctcttgctttaggagcaaagttggctgaagagccctgatggatctaacatcacggcatgctgataccatactttagttcacgccttctattgtggcagctgtctggctccccacctgcttgtccagccatttcgtggaactgcccttgcacccaagctcctagtgcctaaatctgcggccctcttaacctccaccctgcagaagtacgtcagcattgtctggaagctttctcttctggcttctgcttctctgcctttatttcaatgtcagtaaggtctaaccctgacaccatatcctactattgcataaagatactgaactcctaaaaacactgcctctttttttttctctgcaattgcagatatggagtgtgtgtgtgtgtgtgtgtgtgtgtgtgcgtgtgtgtgtatgtgtgtgtgtgtgtgtgtgtgtgtgtgtataaggtactgctttggagcccaggctggtgtagaaactaatgattctcctgtctctgctttggaaaagtagttccttgtgtttccctgctacatttctttatgtgattttgtaaagaatgaatcaaggcaaaatacaaacacagcttttccttttttccctttccagaataaaccctaagagtgaagaggctaaagtgttctattttttcattctgattctataaatgttttaaggtaatgtgaagaatccacttgcttgtaccaccctaccatttttaaaccaggccttattctgtagcctggttaacttcaagccctcactttctctgccttagtctccctggtgttcctattacaggcttgtaccgtctggttcatgtccttctaagtttttaatatttaacgctgatatagtgaaatgaatttcactgaatagaagttaatcatagaatgtagcacagtgcgactgactttggtgtcctccctatacttccccatcattccctaataacagttctcgttgagcagacagtccttacctgtagccctagctccagcccaacagcttctctgtgctcttctctgtggatgtatctactttggatgttttgcatagatggaatttacaaagcacaaattccattcatgcccatgcttctttcccttagcacctatgatttaattttcatttcatttctagtcaaaaatgtccttggcagtaatgactttttaaatccagtatggaagtgattttctttcaacagtatcttcttttgaagcacaaaggaattgtcaccttatttttttctcttttttcttctttttacctcccttataaactaccagaggcaagattccccacccattcctaaatagcctattgtctttctctgcatccccacattagagggacagatcctaggcatttcgtaagtctccatggtctcatgtagcagtagctgtcacaaggaaagtgtttctttactttcaagtgaggtaggtagatgtttcatgctccaggagataatttttgatattatcaataacgccttttgggccatggtggcacaggcttttattcacagcacttgggagggagatgcaggtagatgtctgtgatttggtagctgacctggtattcttagtcaattccattcagagaagccagagctacataatgagaccatgtggactatgtgagcatagttatcagtgaagattaggccaattagcatggtgaaggttggagagtggactctgtgggagcctttagtgtggtcttcggtgtcctgtatctggtgagacactgtagccagtgttgtagaactgatgttatctaccaaacaggacacaccccttagaggccagaatcatgttagagatgaagttgagcactgatgaccttccaaagcaaaatgtaatgattctgtccaatcagggaaaggcagcagttgactccaaaagctagaattgtggagtccatttctttggtgaaactaagcaaatgaaatccgacccctttttctacatttttactgacattgaaactagttttggggatttcttttgtagcatttagtcaattgatatctttgggcttttaagcctcctttcctttcttttgagaaagtttttctctttatccagaaaaaacctttatcctcaagaagactttatacctacttcataaatctactgtctttgattaacagagctattgcttacatgtgtctgtaacttcttattttccattctttaaatttatgctcccttttactagggagacaaggaatggtgaatggtcagtgtgaaggctctgtattccactttatgtccatgtatgggaggagcatgcacatgtgtataaattcctgaagatgctacatacaggtctgcctctgatgccatttccctgacatcgcttgtctgttgttttgagataggctctctcactggtctgcactttgctgtataggctagactgactggctaccaaggacagctacccccagggatccacctgcctctactttccaagcatggaaattaaaagaacccactgttctgtttggcttttcacaggaggattctgggattgaacccagatactcatagctgcaaggcacgttcctcactgactgaaccgactccccagccctggctaccacttttgatccagattgcctaaaacctggcacaggactgcagcaagattcatttcttcacatgctgatattaaaaattaatgttaaaaagctggataccttcaaataaagacttttagcttttttatatttttaatgtatttgtctataaaatagaaaagaggttagaggagaacttaatgaacaactacgtaaaacgcttacagaaatcctggcatagagaaaatacccagtcaatttcagctaaaaagtgttcatggcaacatggctcatctctgtcccgagtctccttgccctggaggaattattcacttcacaaagcattaccagctgtcatatatgcatcttagcccagtcctttctaccaactctgcttttgtcccgcagctgtttctgaatgatcttaccacaccatgttcccctctttagtggcctgattccttctgtccctttcctccctattgtctcttaccatccagcttcagattcatgtagtggactctgtctggtcacttctaaagagctctctccttatatttctagagcctctgggttctctctgttcttcaatcactatctctttgtcatatgtccgcttttacttcttcagtcagagccacagatggaatcttgagactcagcagttttttgtttttgtttgttttttaaatcaaactgttgatgatggtggctataaggggcagagataacaattgctttaaagctagtgcgtattgggttctttccttcttcagaaattatcctaaaaatgcaccctcctcttacctctcagaactgtctgacataggtactacttttggtctcatcggatagaaggactgtgatgctcagagacacaaaggcccctgcagaaagccccggtgcttatatactataggaccatacagtaagcctaggatgtgaaaacctgtctgtgttcttaacaatggccctttaatgcttttcattctttgctttgccagagtattcttctgattccactatgtgtactagagtgaaaataaagacaaataaaggcagagttaatgcttcccccaccctttgaattataaaggaactcgagcatgctacctgtgttagatttttcttgttgctatgacaaaatgtcttacagtaaaagccaaaaggaggaaggatttacactggcccatggttttctggaagacaagcagatttttcactggttgggagcctgcggaggagactctagacagaaagcagaaatctagtctggaagcaggatcaagctgtaactctgaaacctctgctctgctggcttgttagccaggggtatgttaccagtgtttccacaacaaaacacttccactgggaaccaagctgtggacccaatcctagggacaccattttacattcaagccagaggtagccatttatctgtcccgaatttcacacttctcctgaaatttcttagggactatgacttagagaatttctagccattccttgaattgtctctcatttgtctcagtttgttcaatcattttaagaagtttttcactaaatattaccatttctacattctgctcctgcccaactaagtccattagtcttactggcttgccttccagccctttctttacaccctgatccacgaagcttttctctttgtgaccgtgtccaaagagacccttctttccttttcattcaacagtatttatttacttttggtagctcctctgttatatacctttctaaatgactccagaggggttataagagaatcctctttgaaccatcttagaacacagaatagcaaacaaactctgagatctccaggagtcagttgggtagagagctggagactacaactgtggtttagagatattccaccacagctttaggtattcttggccacttgggcttgcatacaagatttctcgatgccttcaggagcagtataaatctagacttttataggcatgcttctgaatttttataattgccaattgataaagataaaaatgtgttgggaaaatgaattattaaggggcgcctactattttcttctgcctctgggtgtaaaaaatcgtgccttagattctccaaggaaaagaatctcttaccaggaaaataggcattccatctttgtatttttattcttcttcataaaagaattttttattacatattttctttatttacatttcaaatgttatcccctttccttgtttcccctctgaaaaccccctatctcatccctcctcccctctgcttaccaacccacccactcccacttccctgtcctggtattcccctacactgggacattgatccttcacaggaccaagggcctgtatcagatgtagaattggtaaagatgttttcccaatctgttgaatgccattttgttcaattgccagtgtcctttgtcttatagcagctttgcaattttgagttcccatttgtcaattcttgatcttagagcatgaacacgctggtaggatttgctgaaggaggcagaggcaggaggatcatgagttcgaggcctgtctgggctgcacataatagaatttaaaaatagacttggtaggatgcttaagaacaatttaattagaactagagagaaaaggggggaaaagctgcaaatcataatagctgccaagagtaggtgcggcagggaggaagacagagagaaagccacgccttttgagttaggctgacatgttcagcagtgaatgccagcaagcaaccaattactagtaaacagcttcaaggtgaacgtggagcagctagtgaaaaagcccacagactcagaagaaaggtgcctaggctttggcatatatatgaaaccaagagacaaactaggagaagttacatttttctgagtttgactcagaagtgtggccatacttagcagttctgaataggtttttttttttttttttttttttttttttttttataatcagacatgggtcttgtaggaaggacaagtacacatcttatgggggtgattgtgcctcccatctctgtactatgactttaggtgaatcaccgtgtcttaggggtggtctcttggccaggtcattgtcagatccagccttattaactcttgctttgttatttttttaatttattttatgtgtatatgtgtgttgcttgcatgtatgaatgtgcatcccatttgtccttggtgcctatggagggaagaagaggggtttggatcacttggtattagagttatagttggttgtgagtctttatgtaggtgctaagaactgaacttgggtcttctgaaagagcaccaagtacttttaaccactgagctgtctctccccagacccttggattaactgttaatggattagatactcgtgtataatgttttaatctgcaaagcagacaagaatattatctctttatcaagggttggtagacttcattttttttaaccaggaagaaggagttttcccttaacagctcttgccacaatgtcctagactgccatgacatatttccgtcaagaatatgaagtagatagaatccatttttatcatgaaaatctaaggatcccaccacaaagctgtccactggaatggaacatcctttagaaaaagtgatcataataacagcagacattcctctggttttcctcatcttcacctcgaaatcccaaaactgctgctttgagtgtctatgcctaggttactgagccagtttcttctatctcttgtcttcatctcttcatgttatgtggcatagaagttgtttttctacgtggccagctttttctaagtatttgggggaaaaagtcatccctcatttattttctttgtaaattctttgtaaacacacataaacacacacacacttttcaacaattagtatgattattttaaggactgtaaacctaaaaaaatagcaaatagttgtctctataatgaatcagtcacaagtgaaaggttctttggatgttgctatctctcacaaatagtaaatttttttaaattacattttatttatttagtgtgagtctgtgtatgtgtgtcggtgcctacgcctttacagtacacatgttggtatcagaagacaatctgtgggtgtcagttttgtgctttcagcttgtgggactctgagataaaactcaagtcttcaggctggacagcaggcaaggcatctttacgtagtgagccacctctcccacctgcaatctgattctttaaaatgaaaagaaaagaaaaaaaaaaagcagcagcctggaaaggaaaaagcttcttgccgtggaattgagtgaccctttggtttaaatgcacatttcagtacatactatgatgaattaccaaggaactcttttgaccccatgtatttgctaatagaatttttctaatgaggaaaaaatggcagtgagtgcttttctgctttttaatattagggttttagatttaaaaataagcttttaaaatgtgagaatctatctatgagctactcatgtaaaccgaaataattttcattttacagttctgaggcaagcaagtcaatgaaatttggggttgataaattgcaattatattgactttcattttcctgctcgggtattcttccaagtgccaatgcttacagtaaatgtggctttgccaacaacagttttacaggacttaaattgcagcaacttgatgcactgagaggatttgaaaagtaacttcaaaggaacagatgaaaggctgtaagctgtttgcaatggtcagctatagcacttgcctctgagcttccatgaacttggacagtgattgaatttagttaaaaggaagactatacagattggaagagagtaataggcaggtatacacaggacccagagaaaatgcatggagaagctgatccatcacacaagaatgatttttcctgacatatgtattgtaggctagagaatatatgataaaaaaaagacagtaatgtaaacatattcacttaagtgaagaatcatttgaaatatggctgcatggaaaaggcctcattacagaccatacttggcacataaacatgatacttgtatctagggataattaattagttttcataggtacagtgatggctcacctgcagcctcatcttgcttatttgtcttggtcaagtctaatcctgaaagagatcttcgacttacatttaaaatgctttcatgtcactcattttagaaggtgttggtaaaagactcacagcgtgaggactcccccacattctgactcaggagaggtgacaccccaaatcactcatgagaaaaggtcttgatgcaaactgcaagaggtttattcaggaaagaccagtgcactggggatgactcgtatcccatgcaggggtagaagagtcgatgacaagctatttgggaaagaccagtgcactggggacgacttgtatttcacgcaggagtagaggagtcgacaacaagctcaaggggtaaggggtttataaagacacaaaaactgcaaacacctggcattgggctatagaaagggaaaagccgcaaacacttggcaaaaactgcaaacacctggcaaaaactgcaaacacctgacatcctggaacaatggggctattttggacacaggtctaggggcttaaataattttttactctctgtcaggatcttttattccccacttcttctagttactagttctaatcttagaactacacttcatggatgctcacagtcagctaatggatggatcacagggctcccaatggaggagctagagaaagtacccaaggagctaaagggatcttcaaccctataggtggaacaacattatgaactaaccagtacccctgagctcttgactctagctgcatatgtatcaaaagatggcctagtcggccatcactggaaagagaggcccattggacacgcagactttgtgtgccccggtacaggggaacgccagggccaaagggggggagtgggtgggtaggggagtgggggtgggtgggtaaggggggacttttggtatagcattggaaatgtaaatgagctaaatacctaataaaaaatggaaaaaaaaatgaaaaaaaaaaaaaaaagaactacacttcaatctcttcttcaaggttcttcaaggttctgcagagactggtctcagcaccaacagctggactgcactaatcctttctcttacaaaggtcactaacctattaagaatcggggccaaatgttagctgcaaaacggtcccatcaaagtggaaatgagggtggttattaaagagggcttcggccaccacgcccctggggttcagttttggaagtgacaaaaagtattttccctgatgaataactgctgagtgagagtcatgggctgatgtgtgttgtcactctttttctaaattgcgctggcagcataggcgcagcttaagaggatcagcagtcttttgggggttgctcaggagctcacttcccatgggaggtgtggatccaagcagagatgccttttactttaacagtggtgggggtggtcagcagcacgatgtaggggcccttctaacgaggctctagatttccagcttgatgtcctcggacgagaactgcatctcccacctggaactggtgtggcaccatcaaatctcctggttcataagcttcattgagctgctcccaggccatatttctgactactcatagggctttcatatgtgcaaacaatgaaggactaggattaaattctaacacttcccctgcctgagtgagtgggggagcccccccgccataaagggtttcatagggagtgagcttaagctttcccagggtgttcctgacagggaacaaggcaaagggaaggagagctatccagtcattcctaccggtttctattatcaatttggttaaggtctcttttatggttctattcatcctctctacctgtcctgaacgctggggtctataagcacaatgtaatttccaattaatccccagttgggtggccagtccctgacttacctgggcaacaaaggcaggtctgttgtcggaccctattaccttgggaattcatggaaaaatttcctccagtatcttcttgaccacgacattggcagtttctttttagttgggtaggcttccacccatcctgaaatggtatctatactgtataccattttctttctgggggcagcaagctgaggaggttatagggattaggaacagttgggtgaatgtaccttcttgttgacctctctcagatcatattcaagtcgatagtcactcgtgcagggtttctttaccagcaacagaggggtactccagggcgactgacaaggcaccaaaataccttgttgtaatagtctctgaatatgtggcctaattccatccctagcctcgcggctcattggatattgccacacccctataagggtagcatctgtcttcagtcccacaaccacaggggtgggggtggggtactctgacagccatcccatgccctggagaaggcattcagccagtctcttaggtctggcccctctgcttgcttcgtatattcatacaggtgatactcttcctcaagttgtagggccaggattatggaggcaggagattcccaacttactctcagcactttttgagtgaatctgatctgggccttcagtttagtcaaaaggtctctccccagaagcggtgtgggacactcaaggatgatcaagaaagagtgactcacttgtcctttgtctaagtctacagtatgtgcagtggtccaagggtattgtttctggcctgtggcttcaaatactatgggtttttttgtttttgagttttcccaatggttgtgtcaacacggagtgttctgcccagtgtcctttctctttgcagtatgcacattggttttttttccaaagttctctgaacgggtcttctcctagtagttctagattccctgtttcccaggtaccctgtccatctattttcagatctacctcttccctcccactctcatactactgcggccagaatcctgcttaagtttctcccctgcctttgatctctcctattttccctttcttggttggcccctgcattacttcttttacctttgtcaaactggtgggatgtcttgccgctcccttgagacctaccaccagagcccagcggtaaactgtcaacccctccctaccttgagccatgctgtaatcccagtctggtctgttgagagggaaccctccgtttatcttgttgggcaaattggtcagggcctgttaatccctgggacactcttccgggcctctaagagaattctttccttttcttccgtggtgaaaagaaccttcaaaagttgttggaaatcatcccaagtgggctgatgagagaacattaatgattcaaccaggctggttagtccagccagattttctaaaaaagtaggatggttagattttcagttatatagatcagctaaggagaatggccagtgtcttagggttttactgctgtgaacagacaccatgaccaaggcaagtcttataaaaaacatcacttaattgaggctggcttacaggttcagaggttcagtccattatcatcaaggtgggagcatggcagtatctaggcaggcatggggcaggaggagctgagagttctatgtcttaatccaaaggctgctagttgaagactgacttccaggcaactagggtgaggatcttatgcccacacccacagtgacacacccattctaaccaggtcacacctattccaaaaaggccacaccttcagatggtgccactccctgctccaaggatatacaaaccatcccattccactccctggttcccatagacctgttcaaaaacatgagtctatgggggccatactaacatagcataatgcaaaatgcatttagtccaactttcaaagtgctcatagtctatagcagttgcaacaatgttaaaagtcgaaagttgaaggtctcttctgagattcattcaacttaattaactgtaatccccaaagcaaggcaggaaaccagctgggcaaactccaaactctgcatctccatggctgatgtcaaagcggtcttcagatctccactcctttttcatctttgttgactgcaacaaactgctttctcctgggctggttccactccctgttagcagctttcctcagcatgtatcccatggctctggcatctttaacatctttgagtctccaaggcaatttcaatgttacagcttcttgttttagtgtctgggattgcacttgatcttttggactcctcctaagggctggcatcacttttccagctctgccctctgtagcactctaagctcaggttgatctactccactacagctgctgttcttggtgatcatcccatggtactgacatctccaatacactggggtgttccactccaactaggcttcaccaatagcctctcataggctctcttcagggtgccaagcctcaaatcctttgcatgaccccttcagtcctgggccatcaactacagctgaggcttcaccttctccaatggccttctctggcctctcacagtgctaagcctcagcttctctccatgatcccttcattccatcacaagcagtatcacctgagtgactcttacacattaccaagtccagccacagcatgagataaaaccttgggtatctctggaacacagcttctttgtgatcccagaaaacaatttccagaagatttcacctcagtgatgctggtctcttcttaatcactgctaattccttagctccagctaactagcatcaatttttcccagtagttccttccattcttaactctagagccagagccacatggctgaagctgctgagttctgatgcttgcatgaccccgttatactattacattgtcactggctttctgttttccaactccttcactgcctaagcttggctttcctggatctttctctgtagaacggccttgaacatggagatcagcatgcctgtctcctgggattaaaggtgtgtatcaccatacctggatctaaatttagctgggtaggatcttgccccaaggtcctactcccttaatcttttatctcctagaacacgagatttttgctccttttcacttcctggtacccctttaatactcgaaccatatattttatatttttcctttctaagcttgctatgcttgttcaaacttctcttcctaagacttaaccagagaacaaagtctctgctgggcttttttgaaacttcttttgtcaatgcaattaatccaagtctcttcaccttagcttcaggcaaacttttcagacaagggcaaaaagtagctacattcttcaccaaaataccacaaaaccagtctttatgccacattctaaaattcttctcctttgaaatctcttgggccaggtcaacacagttcaaatcactcccagcaacaaagtcttccatattcctactaggatgacccattaagccccatttaaagcattccagtgctttccaaatccaaagtccccaaatccacattctttcaaataaaagcatggtcaggcctatcatagcaataccccacttctggtaccaacttctgtcttagttagggttttactgctgtgaacagacaccatgaccaaggcaagtcttataaaaaacaacatttaattggggctggcctacaagttcagaggttcagtccattatcatcaaggtgggagcatggcagtatctaggcaggcatggggcaggaggagctgagagttctatgtcttaatccaaaggctgctagttgaagactgacttccaggcaactagggtgaggatcttatgcccacacccacagtgacacacccattctaaccaggtcacacctattccaaaaaggccacaccttcagatggtgccactctctggtccaaggatatacaaaccatcacagccagtattgaagagtctggagagagtgagggtctgcagatggtcccactccacacaaaggaaaggcagacatcgtgtcaggaacctcatctgtggagggatgctgtgcatgccgactttggatcccagctgttggtcctccgactgtgccatcactgggcccaaggatggcctctagatgttgggaaggctcaggcaccggaaggggtaagggatagggaggaggaggaggttctggccactcaggaggccccttgatctctggatagatctttgggggagctgagggccctggcaaaggcttctttttgggaggaatcttcgtcttcacttttggtctgtggagagccagggtttgagagcctgtcttctgctgtgggatccaccatctgatccatggggatggattctggatgaggtcttgccacacagttatgtagggctgctggtccaggtggaacccagatttgtcctgaaagacaacggatttaacttcaaagattacagtcaagtcaaaagtcccctctggtggccatcccacgtcaaatgttgggcacttggaagcacaaaatgtctgccaaggtcccttcttgatttccactgaaatgttgtgggccctcgacctaacttcagtccagtgatctaatgtcaaacttaggggggttgtcacagtctgtctcatcatccaagtcacgaaaaacacaaaacagacactagagatacacacacaaagactgacaaatatacaaaaccaagccaaggatgcagaaggttgggctggtatgtagtccttccaatccaggaagactactgaatcctcacccccatcccagtcggactcctagagtccttcccttgcaccaaggagtcccgcagagcggcagttgatgatcttagcatgtctgcctatcacactccgggtctctcaagacttgagtctctgtctcctgtgagatgtcgcgactgcaaacagaaacttccgaacttcgaaggcacacagaaacagtttcagacacgaaatctcacctccaagtgggtctttggagacgagggtggtcacactatcccagacatgacacagataaacaaaccaacacaacaagcacacgttcgtttaaaacagacactcagaacagagacactgaccagcacgcacacattccagagggaatcccatacctccaagtcgattcttgggtgtgaggggtgattgagtttcccggccaatgcaccaaatgaaagactcacaacgtgaggactctcccacattctgactcaggagaggcaataccccaaatcactcagaaacggtcttgatgcaaactgcaagaggtttatttgggaaagaccagtgcactggggacgaatcgtatcccacatagaggagtcaacaacgagctcaatgggtaaggggtttataaagacacaaaaaccactaacacctggcattgggctatagaaaggcaaaaactgcaaacacctgacatcctggaacaatggggctatttcggacacaggtctaggggcttaaataattttttactctctgtcaggatcttttattgggttcatataatttggagcatctgggcagaaagcctttatttgaaaacagaagacactgaaaaattgtcaacagaatcccttgggtattcctctatgaacaaggtgtcttgccacatactttcctctccctcctccttccttatatttttgtttgtgttcatatgtgtgttcttgtatgtatatatgtatatagaggccgaagatcaaagtagaatatcttccccaatcactctctacctttaaaaatattctttggcaattccacacaggtatacagtgaaacctgaacatttttggctccctctgtgttctctctaactccccttctgcttctgaagaaatctacagtgtctttcacagagcctgcagattactgatttgcgtggccagtgttggcaagcaagggaggctttgtgttaggggaacttggtttctaaggaatgtatatcagagttgtagacaaacttatttgcttactatcaatgtggttatcttcaagttattgagttttactgattagcaaatgcttgttattgcttgcccttaaaacatggagctgaatagttccactgtcgggctgaagagatggcttagtggttaagggcctggactacttttgcatagaacctaggttcaattctcagaacccacatggtggctcacaacaatctctaactaattcaagagggtgtgatgtcctctcctggtcactgtgagatcaaacatgtaggtgaatacagcacacaaacatgcagactaaagtcccatacaggtaaattaaataaatggatagatagataaatagatagatagatgatagatatttaaaaagaaagttccatgaggatgtagatgagaacctttcagtttaaagtctagcctatacccacaccatgacatacatgtagacttaaagaaaaggacaaaaaaagagattttttttttttaaataaaggggtcagaagaggaaaagttacaaagcaggcacttttctggggacacttgcttagaatcctggctcatgcagtagctgccatgaattttattcagaatattcattgtccccaagtcctcagcatatttgtactgtaataggtcatagctctctttaaagaacagttgatggatggagtgtagcatggtgctttattccctggaacacagagtatggcttttgttcatgagaatgagtgcttgtgtggctggctaggcattgccattgcatgtagaattctggggatagatgagtggctttcactcgtggcaagtgaaataacatatgagtgttgcttgggtgagaagaggagggtggagtccttccagcacgaggagagctgatagaaggacacgaacagaccttgtcttcttactgtgataaaggggtcaggaaaatctgtggggtttcctgtagcagtgacaggggacaaaggggaacagcaagcaatgggaataccatgctgcctttactgacacctacagtacagccataattcagtactcactgccttgtcattgtttctgaatggctgaatggtgttccaagccctcgaatctctcaaatgtgctgcgggaaaggtgattcttcagaaaggtgcactcactcatggggtttccagagatctaacatcaaagcctcagaaagttatacagacaaacaagggtcacagacatctgatgtcagaggctgacaatacaagggcactccaggaatgagaggagaaatgagaaaacagtgaggaagaaaagaatcttgcagagcctagacattctggtgggtatggtttctgtatccataaggcattgacctgaatactggtctcttacatgcttgctctgtggctctggacagttgtggtcatgtccagtgccttagtttcctcttgtgtagcatgcagacaagttaatgtatgcatagcattaaaataccagcagctatgcctcaatcaagaaaatcagtcatgatttccattatttcaaaggggaagatactccttttaaattttattttgtaggcatgagtgttttgcctgtatgtttgtctatgtaccacttgcatgcctgctacccatggaggccaggaaggggacattggatctcctggatatgcagagtgttgggagctgccactgtgtaccctgagaattgaaggcaggtcttctggaagtgtagccagtgttcctagccaatgagccatctttgtagttctgacatttaacattgattcctctcagtgtggaaagatagccagggtgacccacttaggtcaacactaatattaaacccaatgggtgtttatctttgagggtaactgacttgtatgaaagctatgtacacggtgtgggtggatgaaggcatttattaaagttacaagtacatggaaacccgaccaacagtggatattgctccattatgtatgtttgactggtggttgcaaaagtcactactatgttgaagttgtactctatcacagcaaatattattatttcctttacatcatttataaatggaatcaagtagaacccactaagacccaacaacagaccagttaatgatcataaaacttaaactattctgcatgcatttctttttttttttaattgatccaaggatcagttgtgttggcaatgtatctcttgatttttctttgccttaacaatatgtttttacttagaaggccatgaccattgctatacaattaaagaaaacaaaacaaaacaaaaccttaccgggtggaaagatgggaaagcattgaagaaaggagtagactttgcacaataggagtagactttgcacaataagtttcccttgacatgatttttgagacttttatttgctaatgcataaatatatcctggctttgttcatcttcaccagacattgtttctgctaaagctttatatgtacctggaaaaatgaaaaaaattctctctgtctctctgtctgtttccttccctccctctctccttcacttcctgctttcttcttccataattatatctgttgatgacctactatagtttaaaatgtcaaatatgattaattccctccaagattctgtaattatgctctatgtgttaactctagattggtggctggcaagtacatcttccatgtttgtcacttcatacttcagaacaagaaatcaggtgtgagatcttggccctgcttccttgtccaagtggaaaagctcaagatttcttcaaaaacatgtagttcatatttttcaatataatattttattaattgtttgagagtaaaagaggcagacaatatatttggaatgtattagcccctcatttctacctctaactgctagatccatccctcaactcagtctttcctcttcctgtaggatttcttatattttcttaatagcccactgagtccaagttctacctcctatacactcatgggtgtgtgatcatacactggagcatgtgcaccctactaggagccatgtccttaaagaaaacttactccctcctctcccagaagctatcagctgccagcagctcctctgtcattggtcagggctcttaagcctctccccctacatcctgcagtgttgactgtcttgatcatgtgcagggaactatagctagtgcgaggtcatgtgtatagctgtccattcatgtcttgatcacaatgtttcaccaccaattcttatagtctttatcccccactctgaactttggggagaacagaatgtgatggagatgtgccatttatagatgggcactccataatacttgctctcatatctctgacaagttgtgaatttctgtattaatctatgtctactgcaaagaaatgtttctgacagctgcactcaactctgggtatagagagtagaatttggaaatcagtttgatacttttagaaaaaaaagagtagtagttgattcaacctgatggtcatggaggttgctcttaagcagtagtgccacagtagaactcaaatgatagagttgtgtgtatgcgtgtgtgggggggggtcataattaaagaaaaaagaattccatatcatatacacatcagttcctgaaacaggtagaggtgattttggatttcttaagcttatttagtcaagattaaagttcaataaagtaagtgacctgaacactatttggaaaaagcagggtattggaggagatggcagccttttctctgttgctgatcatttaaaaacactactagaaatgattgtattcaactatgccaaggttgctgaacttaccttggaagcacaggcactcccccatattattaaaacaatgattttcaatatcttaccttattaataatgttaataacagcttagggcaagacatttttaacaggtgaacatagtatagcatttttcctgttggaaaacacacaaagctgaatataagctgaggagaccaattcccatcctgcacacactggctcattcctgctgaccagtaaacactaaggaaatgtttgaggaaccaccagaagaaagctctggtggtttctggttttggcagcacatggttagtgagcaaaatctcccttatgggctcacatatttaaacatgtggtccctagctgctactgatgtgcggaaggagccttgttggaggaagtgcgtcactggaggtgggacttcctgagtacagatacaatgtggcccctgctcttgccaccatgaggtctccatgactgaaaacatctcccaggagtgctcatcctcacccccactgcaccctcaaatcaaacatcaaagcaaacaaacagccccccccttactttctaccttagattgttttgtcagggtgtttgattacagcaaaaagaaattaatcatgacactactggcaccgtatcatgggcaaaagactccaaaccttcagatgtttaacgaattctccagaacccaagggacatcagtgataaacagaattgctgcaaccacccacttcagcattgggctttctgctgtgaactttcttcttaagttatctaatgaaattattgttattaaattagtaataattcccatagaacagaattttaagagctacttttaaaatactaaatcagtttttaacacaaaggttttccagaaaatgactaagtgttataaagatggacacattctgaattttttggtaattaatgtgaggtattaagaatttttaaataaaatcttagtcccgcaatatttaaatggtaatggtagtttgcaagctcaggactcaagtgctcaagcgctcatatcaaagccttagcctaccaagtccatgagacttcagccatcgtatgccaccagtccaagacaaaggtgaaccctgacctggttaagcgtgaaagccatgaagagacaaagcacctctcaggctcgtgtcttcaggaagccatgatcaaggaaaatatgtcactggataatcaagtacacaacgctacatagctttggggactgtcttgttttctttcctttttccacaatcttgattttgctaacattttagacaaaatgagtcttttttttttagatcatttatgtttttcttagcatatatcctgcatatttgtttcgctatgacatttttacatgtactttgatcatatttacttcctactgctactctctcttctgcccttgccaatgttctttctcttccacgttggctagataattcttccctgggagtggttttcttgcatattgcagtgtattcagcagaatgccctggtctctgtatgttagatgccaggactactcacccttccaaatttgaagcccctggatgctcctgtgggtagaggcaggggaaagattgtcccatatttcataaccactgttctaggagtttgagaacagtatatctcactaaagttcccagaggggggaagaattaaccaaccatgagcacactggctgggcaatggtgggtcacgcctttaatcccagcacttgggaggcagaggctagcaaatttctaagttcaagttctacagagtgagttccagaacagccagggctacacagagaaaccctgtctcaaaaaaaaccagagtataaaaaaaaaaaaaaaaaaaaagaactaaccaatcatgagcacagttaggatcattaaggaccatgatgagaggagatctcagatactggtcaaaacctaaatgaatcctgttactccaacctaacaacagatctcagaattgcctgggaagtaagcataaaagcaacctgtgcccgtacctacttttcccttaatagtccttcgcaatactcttatttccagtggtactacatttagtaacttaagccatttagattaagtcagataatggctaggtaggtttactaagtagagctcatgtcttcctagtaaataaaactgcagaagagaaaagatcactccagatccttgggcactgttgaatgtgagttgacaagctaatcatgacagcagcagggggtctctaagagtcaaaagttggggagcattggaagcagtgtctacaggaggggatgcctaaggaaaactccaagcaagtgacctcattctatagctatttccatgtacatggtgagcatgctgcgcttttcatccagcaattcaggctaacctattaggacctgggaggaggggcactgtctagtttatggattcagggaacttaatgattactgggagtagacctcattggactgattggttgtatagagaagaacacatgatcagtattagtgctgttgaagaaaacagggtagtgagtaatgttcacagcatatgggcctcatgtaggtaaacaaccactcaattttgttgttatttttattgcctggaaacaattttcaggattaattaacaagcaagatgatgtttcttgattttaaagatggagatagtcactgttattgctgttaatgattttatttctgaattctgagggaaaaactatgtcaattgatcattttgaagccacacatagaaagatgttattttatgttttacatacttatttttattttctcgtttgactgttgattttggctgcactgagctttgagctaatggtcttggaagtgctaagcaagtcctccttcagtcgcctacactcttaggcccctaccctgcccctaccctggataattttaggttgatgcaaatatgaggtctcttgatctgtatttctcacaggtgcctactctcttataattccatgaccatattctgtgtatctattccaagaattgatatttcttccacttaagaaagccagtaccatctgaccacagagtttatatgtcaactgggtgagtgcaagttaggaaactcatactacgaaagcactgtccacataaccgcacttacatgattttatatagtatctgttacgccacatatgtctattggatgcttgcaatatgttgtttgacagtagaatccaagctttatctcatttcaatttcactgtaaagtttaacttctagatatcagcaaacatattggataacgtaggtctaggtcattaaaatacactttctggaacatattttagggccaaggatcatggatggtgacaggtatattcaactatttgacaaggttcatgcttgagaaccacacagtcaaattaccaaaaataaacaaccctcccaccccatactacagtaatcatgtcttaaataagtttatgttttggtattgggacacattcatagttatccttgactacatgaagcctggacagtggcaagggagacctcaaactggacataactggtaggccttctgaacagaattatagaaccagcatacacatgtctaagcctagctacaaaggcaaaaaattttgaatataccaactgcttattgtgcatagtggctagaaagttaagacagcaagtgtctggttgatttactgagacctaatatcaaacataggcatgtttaatattgacaggaagaatgtaagtcagtgtagacaaataacttttagatcttcttccttctgcttttgaaattgcatctaagcagcgaagaggctctatgtgtgtgggttgtttttgttgttgttgttattttatgtgcagtgattttttttcctccttatgttccccttgaagcagtttaatataaccctgtcaggttcaggaggtatgtttggaagattcacaggagtacagtgtttgtgtgatatagaattatttatgtatggcatgaaagaccgcagtcgtgttttcgagctgtttatgttattaattgtgacatttggcaagatacaaggaccttagtgataacagtgagtgttcaaaatccctctgtgtggttgccatcctgctgatatggggatataggaagtaacttaagagactgtttattctggagtttataaatattctgtaaagcttcccatcataaataaaccaaagcactgtctgtcacctagtcacctgtaatgggaagctttacagtgaatgaaatactgtatgcagtgtctgtccttgcctcatcaggccaaatgcacagactctttagaaatttgtagcaataataactgacattggatgtatctataatatatgtctgaacattcatctgaaaatacccatgcaataagacaagtcaggtttgtcatggatggaacataccactattcagaaacaggcttaagtgatgcaactcattatatgggacctaacacagttcctggacccaataaatctattcattttgttattactattgctgttgaatatctcaaaggttatatattagaatatattattataagtccaagtggacaaagcactagctattctttagaccaaagaatacctggatagtgtgttttgttatgttttgttattgctgttgcttatccttgcagctcaggtattcttttgcaatgcaaatcaatcccagttaatttcatttattttataaattaagtatttatacaccaggtgttctgaaagctgtgggcattcttttctcacaacaatggctcgctaaaacttaccagatggattattgtggcaataagtagaaatgtcttctaaggaattgttggattacacaaaattgtgccctaatgacttaaaaatacaggataattttcattctcctaatgactatcatattaacttttccttgggagaagtaaacacttgtctttcaccccagatggtcgctgagggataccaaagtacccttttcccaaagtctgacttggtgaaaccagagagtttattgtgctgatgacagagcacaggtaagggataatacagggttatgagctatggaccaagcccaaatagctctaaaactgcaaagttcatgcatgagtatcttctagaaggtacatcattgactgagcctttttcattaactgtccacctcctatatcttctatgaaacttctctactgtcaatgtaggtagcttcattaccataacaacagtcctagctaccaatgtgttgttttgttttagttgctatgcctactgaggcaaagttctaatggcagcacaatgagatcatgatggcagactcagaggaaagccaccataaaataattatccattctgaaaaatggaggaatggcacacaaaatcaaccctagctgagtccgaagttctctctttcaactactggaaaattcttacttcttatactgttagtggacttaaagggcaacagcctaacagaggttatatagtatatttttatatttaactggtgctctaaatcttttaatgtagtgtcagaatcaaccagacagatatctcaactactcactgacttaaaacaatattttgagtatatttggttaatttgacctctttcacctcagaagttgaattctgatacatgcaattctctgtgggggaaaaaatgtgtctctttctgcatggaggcatattcttaaatttagaatgaaatgtctctctcatggcctgagggtacctgtgcattaatgcagaaattgatattaggataaaatcttgaacaattagggataagtatctaaaacccaattaacctttggcagttttccccatagcagtaaagtgctttcattttcactactgttggattaaatgaatttttttgtcattgtataaccagagacaaaggtcagtctttgctaaaccagtgttagacatgagtgcgagcagttctgtcagggctacaggtggatacactgtgcttgatttatgggatgtgctcttcttcctgaagttgctctgtgcatttgaatcgtgttgggtctcccttgaagttaattcatgatgatgaaacaaactttcaagccaaggcttccaggtcctgattcatgacatagtgaccatgacctctgtggttgatatggcccatgaaaggccaggcactgctgatgtcaggccaaggcacaacatgcttttctagagttaagaaagataatgttgcatccatcttgaaatcaccttaactataagctacattcatcaaattagtttgatgtgttcaattggtgtaggtggttctatggtttgtacacacatttcctctattaaattattgctaaatgctattaggccttggtggaaatgtcttgtcttctcaaccttgaaataatacattgaaaggactctcaacctttcatgagaagagtttgcagagccacgggccctggatagtgatgttttgtagtactcatgttcatgtgtaatatggcctgaaaggaaattatagccaagtgttagaattgcatgcattcctattacttcatagatggctggtttggatggaaactgtgttttgagatagttgtctttcacagtactatatttgtttcacaaaactgacgcagttgggtttttttcttaacacatttaaacctttcactgattaattgtgtcattaatctatgggttgttacaaaacatatgaattattcaattttcctttattctccaaccaggaggatgacaggaaaaggaccttgcactgagaatttcacatggatatgctttggcaaatgctgctcctcttgggccttttatcacataagtagaactgtctgggctctgatttgcatagagactattagtcatctgtgtgttatctgatttccccgacatgttagcagttccatgatgaaagatagtccagctataaaggattaacctttatacatggagaaacaaatacctacattggcattcaaaggacagataaccatgtttcccactaaaactagccagcattgataattttgagacactgcttacttttctgtgttatatcatcttcaatgaggggtattaaaaaacatctacattgtatatcatattatgttaatatatgctttcatttttcatatatttgcttttattttaaaaaatgccaggaaataactttatgagtatttgcctctggcaaagttaatgtatttttaaagggtttacaaaattagttcccatgatccaaagctgcaatgcatcattttagctgggcacaagcggtggggggagggggaggacagggagcacatctttgtgtcctctttactgtgacatcttaaactacagtgtaaattcattttgcactaatatttttgttttacagaaaaattgtcattattttaatagtaagagcaagttttagagaaagctgaaattgcttttcctgaagtcagttacgttatatgtatatatggtctctctctctctgtctctctctgtctctctctgtctctctgtctctgtctctgtctctgtctctctctctctctctctctttctgtgtgtgtgtgtgcctgcctgtgtatatatatatgttaaagatcagggacagacccatagatgttaacaaatgttggtggcattttctgtactttcctaaagagtatacatcttgtaaacagcatgtatttccatttcctgataaattttctactgaaccgctatgtcttgaaataacatctgagtgggaacagacttaatgaacacttgaaactcagagtaggagagtctgggcaggaggtctatagaatatgaaaataacttaaatgtaagccattgtgtgcacagttttgttttgcctaataaaattttatgtgttttgcctgtattcatggctgtgccccatatgcctgtagtgccttcaaaggtcaaagatgtcagatatctctgaactgaagttacaattgattgtaaattatcatttgggtgcttgttggaaatcaaacagcagacttggcagaacagcaagtattcttaactgctaggccatttctccaggaccacagaacatcatcattaccctacacatgcctgttttaagacaggaagactgcatcagtgctttcagtattgttctacctaagcaaagcgtagttatattaggcatttgcttaaaaatcatgaatactctaagaagaagtgagttggaattttgatggggattgcattgaatctgtagattgctttcagcaaaatggccattttcactatattaatccttacaatccatgagcatgggagatcttttcatcttctgagatcttcttcaattactttcttcagagacttggagttcttgtcatacagatctttcacttgcttgggtagagtcacaccaaggtatgtaatattatatgtgactattgtgaaggatattgtttccctaatttctttctcagcctgtttatcctttgagtagaggaagtctactgatttttttgagttaattttatgtccagacactttgctgaagttgtttatcaggattaggagttttctggtggaaattttttggttcacttaagtatatactatttatatcatctgcaaatagtgacattttgactttttcctttccaatttgtatccctttgacctgttcatagctgccttatttataatagccagagactggaaagaactcagatgtccttcaacagaggaatggatacagaaaatgtggtacatttacacattggagtactactcagctattaaaaatgataaattcatgaaattcttaggcaaatggaaagaactagaaaatatcatcctgagtgagataacccaaccacaaaagaacacacatggtatgcagtcactgataagtggatattaacccaaaagcttggaatacctaaaatacaattcacagatcgcatgaaactcaagaataaaggaaatcaaagtgtgggttctttggtccttcttagaaaggaaaacaaaatactcatgggagcaaatacggagacaaagtatggaacagagatggaaggaaaggccatccagagactgccccacctggagatccatcccatgtacataatcaccaaacccagataccattgtggatgcccagaagtgcttgctggcaggagcctgatatagctgtctcctgagaggctctgccagagcctgacaaatacagatggtggatgctcacagccaaccattggactgaatacagggtccccaatggaggagttagagaaaggactaaaggagctgaaggggtttgcagccccataggcagaacagtatcagccaaccagacataccagagctcccagggagtaaaccaccaaccaaagtacacatggagtgacccatggctctaggtgcatatgtagcagaggatggccttatcagccattgataggaggagaggcccttggtcctgtgaaggcttgatgcctgagtataggggaatttgagggcagagcgactgatgtgggtgggtgggtgttggaataccctcatagaaacagggtgaggtgggatgggatagggggtatgggggggagagtgggcgtaactgggaaaggggataacatttaaaatgaaaaaatagaaaaaagaaaaaaagaatcaagaatatatatcaacaacaattagaaactattttagaatattcagtgtgcctttctttttgcaaaaaatacagttaaaatccttttacattagaaagtgaggacttttttagcctttttctccctttcctcactattgcattgcacagttgtcttgagtgtttgtttccttccacaattcaaaagccttcaaaactttctcttaacaagtctttgttttttgttttgttttttttccattttttattttgttttttgttttttttttttttgtttttgtttttgttttttttttcgagacagggtttctctgtgcagctcactttgtagaccaggttggcctcgaactcagaaatctgcctgcctctggctcccaagtgctggaattaaaggtgtgcaccaccactgcccagctctgactcagctctttatcctgggcattgactccgtccatttctggccttcccttacttttgtctcctccctcccactctattaaccgaatatagaatatagaaaggaacttggcagggttactccagtgattagcagaccctccagtgtaataggaacctcaggaagatgcagccccatgacagctcatttcaatgttaaagaaacactctaaatacttatgggagcactgggtgtggtatttgcttttgactttgggctacataggattctgaatcaagttattacttggatatatgtattatttttgttcctttcttgattggtctttatataaatgccactgttcagcctaaaagactcaatgtaggcgatgtggtttgtatgtgtctgtgtaggcacatgtatctgtgtgtgtgtgtttatgcatgcacatgttattttttattaagtttttcttttctattagcatttaagaggtgggagaactggggttgatgttccacaggctgaatctttaatgtccacgttctatttggattcacataaacttcttgttttaaatggtatgtatgctacattatctttacactaaaggctttagtacattttagtcatgtactaagtaagattgaagaaaacaccctaaaattggattgccagaggtagaaattaatctactgttggggcagatgatagaatatttttgcagaaacaggaaattactactttcagttgtgcaaggtaacaagctaagatgttgaatcttggcacacattttcaatacgcttttaaagaatgattgggtaagaaacatctataattaaactcagttgtccttttgttaagtttccaaaggactttggattgattgctgtgtttggtggtttagctcttcagcttaaatatcaaacatggtgaaatttgatttttattttatattaactaaataattcaaaagactgaagctatgactaagtggttaagtacttgcctatcatacaggaaggggctccattcacatcaacacacacacacacacacacacacaccccaaagtgaacacattctagtattacatcactcttattagaaaagttactgagttttcaaaaatgataagtagcagaacggactgagcacatagactctatccattcaccttcataatcaacatgattagttgtctaaacaccagcccctcagcagacttactgctttatggcttactgtctttaacctttaagtccatggtacccagaactgcttgcatgaggatgcttacaggaggaatttagaaaagactcttcagttggactatggtgtaggctcttgtactgagttccttagtctaatggtatctgaggtacttttcctagtaaccgtgggcattaaacactgcgatcccacttatcatccagaaatccttagtcattgcattagccaggaaaatctgcacatgcactcagtctgatcacatccaacttctgatttagaaactaccatgccccccccccattgttttctgcatgaagttctaacttcttcagagtatctctgatctcctgtgaaggcaagcctgcacacattctttgactattcccatagcactttgtcttgctttctctgttgttccttattttttaaacaagttggcttctttttcatctgatgctgattatctgaggtctcaccaaggccttatcattcactgggtcttgacttcagtgctgtatatccccatcatccttccatcactaaatgctcttccatctccccatacatagatctggtcagctccatagtcactctgtgactgttacaagtacaatcaggtgattataggcctaaacctaggaccagtgtctactgaactggaagctactgaatgaaagtgcaggttctaagctgtttagattaatgactccatcacctttttctgtgtctggcacattaaagtattccacatctgttcagtaaataaggtagacgaggttttggagatattctgaatttttggtttggtagattttttttttaagaatataaacaagttcttcactgtttgattatgaaactcagcaccagtggattaaattcttctctgttgacttaaatctttataaccagcctaatcctttgatttccactctgaatgtactgaactcaatatcaaaagaaactttaatttcaggggaagtgcactgatcatatcagactccaaacacagtttttaaagagtctgtgtgaaagtcagagctatagataaggaaaaataaaagtaaattcagaacagaagataaaagacacagcttgttacaaagaggttaatgcatatggaagcagatgttactcatttcataaatttttgccacccaagagcttctgggtgtttgttcagagaagtagttcaggcccaatttgcacttgtgaaacattttctggagtaatgatggagaatcttcaaacatggccatatcagaggtaaaggagggaaagaaaccaggaaaagaaactgaaaaggaggtggaaagaagcaaatgaatccatgctgctaactttatatctaactagataagccacaggtgtgccaccaccctggctttaccttccactaatatatgcttatacatagggagctagaggtagcggtggttgaatgggtgaggctatatcttccatgttgggtatcattgcatttctttttatgacaattcagaaaaggagatggaagtgttggccaagctcagagcctcgggccttgggaatggtattgtcatagtcaaggcattgacatcagttctagcacacgctcacagaccatcttgataaagctagagtaagcatctatgccacctcaaagttgtctcccaatgtcaagactgatgttatcaatgctaagctcaaagaaactatgatagtaagatacaggctctgttaccagcagtacctcagcaatttttacataattgtaaggcttctgctaggaaagtaaggttgttactaggtaagtatgtgggcattaccctgctaataagggagaggctaaatgctcaactaagctgacatacttgccacttatttgttctatcaacctttatagtatctttgtaaaagaccataaaatcagttgttaatatgttactgatagggacttttaaaaatgcagtttgggactaatgctataattttactatattctgggaatgaaattatagaaaagaatgatagtgaatctgaaatacaatttttgcctttcattcatgttagaaagcaaaaggaagggtctaactgccactgcccattgaaaaatccactctgacacacagtggttcaattggtctgcttgtacatcatactaatttctttggatatctgccaatggactgaaacatactatctatctatctatctatctatctatctatctatcagtctgtcatctattcattctcacagaatcgccttgtagatctgggctaggtttgaacttgtgatcttcctgtcttggcctcctgagagttaagattattagagcacaccaccatgcctagttaacagatactttatgatgaagtagaatattcttttgtttctttcacaagaggattctaatattattttgttacaaatcctggagtgttaaactttgggcaacattagagacagggctctataaacaagaagttgattctaagaaagaaaggcatttgatgtcagaggcaagggcagagctggatatctgcagggattctcagtgaagatcctgcatccttgtttccaggttgtctcatctatgtgaggacccagagacaaatattccagagtgatcctgcagctaagtgtcaccatgcctgtgaatattccttaccttgcctttcataggaaatgctgactaagtaatgtctaaaattagaagcagtaacatcctgagctgttcacatctttattaaccagctgctatagacgtcaaaggtgggacctagttcaaaagtcttgacccttttccaccacactcttcatagacttcagtatatgtccctaatagggtatgtacagtacttcacaaagacagaacagctggttgcttcctgctctgtatagtgaatgagtttaagattgagagaaaatttcaaagaaggaaatgaaagatgatttctaattctgggtttatcaaaaaataatcatttggttagatctaagcacttaggtttctattgcaactgttataaaataataataaaaaaactgtagtaggtcatgggagataacaaattttatatcctgaaacatttgaaagcattgagtacagaatggacacctaagttgttacttaaactcatacggaggctagaccttggggcattggtttgggaatgtttggtggagtaattgttagtgaaaggcctgatagcaggaagacatctacagtaaaagggggtaagcatttaagacaattaagtagcacctggagaactgcagagaggaaatatgttttaatgtcggctcttaggcctgatttccttgcctgagctcaagttctaaattaatttggcttcagaaaacatgaagtcattttgaattttggccaaaaatgttgttaattcaagcatacatccataaagttaatacagatgacataaagttttctagcattgcctcttcttacaaattatgtaagcaaaaggaagccctttatagagagaatgaaggtcccaagctctgggacataggttatgaatcatttgttgttacagaaaaccttagttagttatgataatatagatttgctacaaacatatttttaaaaagtccttgccagtatgtacagcttggctttagctctgtggcttaagaactactctataaaacaagtttgaaattttcatgttggttatttaattaggctttgttgtgagtagcattatctctaagattgacaactgaaataaatgtgtgtaattggtcctctaacttttaatcaacttactgtgaagactggatagctttgcaggggtaaaataagaatgactgaatagtcacaccacagtgaatcactataaagctagagaaagcataaagctttgggcgataagacaatgtagctaagcaggatttttatgatctataggagaggttggggtgctcacagaagacagcagagagcccactgacttgagacaatcagcagggacagagctgtggaagaagctgcagtttgaggtttaaactgaaagggagaaacctctgctaggcaatcccagaggtggcatcgtgagggtccttctatgccattggccatttatgctgagctgagaatgtgcacatgtggcgtctacaaggcctacaagagagtggcttctgatgatctgatcatctggaacagcttacaagcttgcttgagaccagagacatagtacaacagaggagaatgtgccactgaaataaaacatcccaggaaatctatttttaaaaaataagaacaaatctaaaagaatcaacgcaatacgctaatagcctggggaccagaacaatgctcattataaatgtgagcagtggacatcagaagatgtcagtgaacttagtgctgtagcaattggaatctttcaatttaaacaagaaaggaagaaatgggaatgaaaactaaattgttaagtcaagggcccatagattaggtagaaatgccattgtaaagtttctagcaaaatgtaggagctagtcttaaagaacaaatcttgaagaaataaaaagcattgactctataatgaaataactgataaataggacttgcttaaaagtaaaatagtttcttcatcaaaagattcagagagtgggaagataaaggcaagttacaaattcgaggacagcatcataagtatgcttgttggacatgcggcatgtgttcccatgaatgcaacctctaaacttcagcagtttattgatagatatcaaatagccaattttatgaaaaaggacgaaactttgactatagatagtgcttgacattaaaattttagatgtatgtatatgtattcaaattaccactaagttcattaagatcctgagtatcattatcatgaaagaacaaaataatgaaaaataaatttgaaattcaaaagctcaatattatcttgagagataacattatagacgctgtggggagatgacattatagatgccctggtgactgaggactctggatagtagttcctaaggagttcttttttagataattaaatgtaccccttatgatccagtgggtttcctctttgatttttgccaaggcaaaccgaggcttatacttaccaaagatctctacccagatgctcagagtcactcttgtaataaagaactcagtcaacgtgagaatagttggacttgaatgttcctttgggtaataaaatgctagtccccatttccaaaaagcaactcacataatgtgtgcatatagtaagtaggtgaactaaagtcaacacaagaccctatggactctgctgttatatttatattaatttcagaagcaactgaatccatgatggcagaaatctagcatctgctatagaagtggtcttagggcagaacctgtgcccaggaaactgcttagggttatgtccatgttcctgtgagtcttgattatatgtgtatatatatttcatgtgtgtcaaaggttcaattgtagattctatagattttgtctgtctataaaatctacagaagttatttaaatcacggtttaattttgcaaattacatttatttggggcaagagagatggcccagaggtgcagagtgttagttgctcttgcagaggacctgggttcatctcctagctcctatgtgatgtctcacaagcgttcataaccccagctaaagtttgacactgtcttctgacgtccagtggtattaggcatgcatgtgccacacagatatgaatgcaaagtactcatatacataaaagaaaaaataaaaactataaataaaatcaaaatcatttatttattatttgtatatgtgcatgagtgacacatacacagaaaacaacatctatggactatatttgtggttctatctttctactgtgcatatctttgtgattaaactccgggtttcaaacttgatgtctttacccactgagccctctctcgacctttttgactggctggttttttgttttgttttgttttgttttttaaacaatgcatactgaaataatgaatgcaaattaaccactgtgatttgtgattcatgtacaataaatttaggccaatgtgttcataaaattctcaagtgtttaagacacacagagtagcgttttagatataaatctattctaggggatgggactagcactccggttcagagtgtaaaggtgtcagtgcatgagtcaggatacagacagtacgtttcatctccagaaaccaccagaaggtggaaagagagaactgacttgcatatgtgtactgtgaaatgtgcatactcacacacacatcaaaaacaacaataaataaagttaaaagtaagcatagaacgtggaaggcctcatcagcacatgatttggtttgggttttcctacttcttgtgttagtttttaaggataaaggtttgctgaggatttccagggattacttaaataagaacaaaattccttcttgtaaaactgatatatttctcaaacagtacactgaaatggaattttccttgaatttttttcataaaacaatctgaaaggacattggggaatatgagctacttagggaatatcaggaaatgggctcctgattgagtaacataccctagaaaattgaagccattagtctgggtgatgagaagccaggaaggactatgacctgacctaattgaaaagaactgatgataaagcattaacaaccatgatcctctgagaatggaattgaaatggccagcccagcgtctgctagcattcagtattgttaggggaatggtgagttcatttttacagattagcacttcgctgatgaggataggtgataatggactaacaaaaaaccctccctccctttccagtctcctcagagctaagctttccatgcatacatctgtactgtgctactttgcgtatatatacatcatctgcctacacaagcggggcaggggtagcaccgtataaaggagaagtgtgggataaagtgttcctccagccctttggtagcggggtggcattcagctagtcttcctgagcttgtctgagcaggttgctatagaataaactgagacatataatatggaaaaggcagagcatagggcatgctaacaaaggtatctttttgtgatgattgcccccatagagaaggtgacagacatgtgaggtttgcagggcccttttttctaaagtgaaaagagaaaatagaaagcaatagctactccttggtaaatgcagactggctatcttactgcagtgaattgtgtgttttgtttcaaacaccagtgtttggggccttcagtagaggccaaattgctcatcaatattatgtgtacattaaagaggctttagcatctacaaacattgcctgctgtgtggaataagtagataaagaactgtaatttgttgttaaatattttcatgaaaggacaaaaatgttctatatctaaatggaatgagagttaaatgaagttattgaacattcagacctaaatcattttaaaatatcagactaagtgctggctttattagtgactatggtttaaaaataaatttgaagaatctaaacagtattaaatctttggaagtctacaaatgaacagtagatattttgcctgacagagatggtattctaaattctgaggccagaatttgtctatgacagtaatgtacccttgtttggaaataaacaaatggatatgaattatgggtgggagaaggaatatattagaatacaacagtgaagtgagtttctctagtaagtatcagctactatttgtgtgtgtgtgtgtgtgtgtgtgtgtgtgtgtgtgtgtgtgtgattttaataactattttgaaagttacttggatggactttaaaactgttgtgactatatatattgaactacctaaaatgtaacttttattttcaaagtctgcatctgggataatcctcagttacatactgctgcagtgaatacattgtcactttgtgcacagaaggaagaatgctttcatatataaagtatagggtttttttgagggccagtaagatgactcagagggtaaaggcatttgctgccaagactgacccgggaacccatatgatgggaagaggcaactggattctaaaatttgtcctcactcttgcatgtttgcacatgatacaaagtcaatgaataaatgtacaaacttagatctgtttgtttgtttgttttgttccatatcttggaggagtgaaagacccattcttcacattgctgacatctcattgctccagctgcccctacaaggaagcactattcatgagactgactcctatctatccttcaaagttagtgcacatatttttatctctgtttaggttacagtctctttcttctccccattgcactcttaagccaccacttattcattctgtgtccctaatatgtagcatgtgattcatatctaaagggtctctagaaactgtttatgggatgaaaggatgaagtaataactgagtagtgggaaatgtaccattttgggggtacatttcagaagtgttccaacaggatatgccatacagcacagtgttagggagagctattaagaaagctcttaatcaaaaaggccagaagaagtcttttgtgataattcagacttatatttggctgggacagaaaaccaagattgtgagataggcacaactaatttctgctgtaaggacagcatgattttgtatactaattctgaatataaaattgaggcagtgctcaatcagatattgcttgctggtacaaatggggaaaaagaggttctatgacagagcagagtggctgagaagagagctgctgagagaagagcaatgttcctttggatgtgatgattttgaagttaagaattctttaagataaataatgaggaagagaccagtgactatgctgccatgcaccgaaggcatggacgttgatattcagctgctattccatgtgatagctagggttgccttcatgttggtgctcaaaggaaatcttagggagaatcatattctatctaagtgtaaaagaattcaaatctaagcatcccagggccaaacaatcagctctttctgttgtaccacaacgttgttcttaactgaggaggtctgcatctcagctatcttccatatcgtcctcactgccttcttgaacgtgtcctcctcatcctcctcctcttcctcctccctcttcttgcttgacttgttcacatggcatttgtctggtagaaccccagacagtttatactttctatcaatggcctttcaggattatttcttatagcactccagtgaaatctctggcacttctgttgcttagtattttgcttacttgggtagggtacaggcatgaacatgaagaccacaaagtccaatgtaatgaaccctacatggagaggctagaagatggctattgtagaacatgctcaaacccttgcatgtgtgttttgtttgtttgagtgcattcttttcttttaattagatattttctttatttacatttcaaatgatatcccctctcctagattccccccgaaaacaccctaccctccaggcattcccctatactggggcacagaaccgtcacagaaccaagggcctctcctcccactgataactgacaaggccatcctctgctacatatgcatctagagccatgagtcccaccatgtgttttcttggattggtggtttagtcctagggagctctggggttactggttagttcatattgttgttaatcctagagggctgcaaaccccttcagctccttgggtcgtttctctagctccttcattgaggaccctgtactccatctaatggatgactgtgagcatccacttctgtattagtcaggcacttggagaccctctcagggggcaactatagcaggctcctgtcagcaagctcttgttggcatctatcatcaatagtgtctgggtttggtggttgtttatgggatggatccccaggtgggtcagtttctggatggtcatgccttcagtctcttctccaaactttgtctctgtaactccttccattggtattttgttcccccttctaagaaggatcaaagtgtctacactttggtcttcattcttgagtttcatgtggtttatgaactgtatcttgggttctgagcttctgggctaataactacttatcagtgagtgcatatcatgtgtgttcttttgtgattggattacctcacttgggatgatatcctccagatccatccatttgtctaagaatttcatgaattcattgtttctaatagctgagtagtacttcattctataaatgtaccacattttctgtatccatttctctgttgagagacatctgggttctttccagcttctggctattataaataaggctgctatgaacatagtggagcatgtgtccttattacaagttggagcatcttctgggtatatgcccaggagtggtattgatggatcttccattagtattatatccaattttctgaggaaccaccatactgatttgaagagtggttgtaccagcttgcaatcccaccagcaatggaggagtgttcctctttctccacatcctcatcagcatctgttgctacctgagtttttgatcttagccattctgactggtgtgaggtggaatctcagagttgttttgatttgcatttccctgatgattaaggattttaaccatttttttttttaggtgcttctcagccattcggtattcctcagttgagaattctttatctctatacctcattttttaatagtgttatttgttattctggagtccaacttcttgagttctttatatatattgtatattagccccctatcatatttaggattggtaaagatcttcccaacctgttgattaccattttgtcttatttgccttgcagaagctttgcaattttatgaggtcccatttgtagattctcgatcttacagcacaagccattgctgttctgttcaggaactttcccctatgcgcatctcttcgaggctttttgtttggctgcattcttaatccattgcgagctactgttacttccttggaacaaaaatgttttggctgtcccagtgtttccttggtggatttgcatccctgcttctgccaattgcctcattttgagtgttgcactaacatcaggtttcactggtgtctgacagagccctgtctgtgaaggtaaaaatgtactttggattcttgctgaggaaggtctctttgcaggctctatgaaaatagactttaaatttcatgtcactacaaaaataccctgtgatcagcatttgaactttctgtttctgcctctatggctaaagacaagtgatatgcctaggttgctatggtgaaggagaaaggggactaacgaattatgaaaggcatttcaatattcaaagcaacaacacatttgggaaatttactttttgtagttttgttattcagtgatcataaagtcatctagtctactcaagtctgtgtaatgccaaagtctctactgtgtcattctcaaccatggcttttgggagaagttcgttagtactgtgataaaatccaacaacctgcctgcacttttggaaacctgctgtgtccctaatgctgaataagccccaatgggacactgttcccaacgtaatgatctgtttatcttttgttttctgtcctattgcttagacagatagactgcatgcaagttaaatgaattgatgaatgttcctttgtctttggagatagctctatacagagcaaaagaagcctaacatatgttgagtattttatttaacttacatctttcatcaattctgagttagctaacatgagttctctcttttgcagaggacttagacacaaagcaggtgaataatttccccagggtcctgcagttggcacagagttgagtcagcttatagcccagagcacagaattctggttaacatgccacaaaggcccaagttggcagaacaaggtatgagtgccagggagttggaacctcttgatttgtgcttgcattttgttctcttccatttctttactctgcaagtgaagctgtcccttacattaggattccatgatcttaatagtgtcctgaatcttccgctagctttgttgttattttaattataatggtatactacacatctcaattgtttataacaagtgtgtgaacagaataaagccattttctttctctttgtcttccaaacctcctcactgaaacagtactttcttggtttgggtgtatcaaaggatcacagaacacagtaagcaatgcctggttatagaatgcattctttggcataactctagaagggaaattctctggtcaaaagaagacatccacccttctggaacagtcagagacaattgtgacctgcctactatgagtaccagaaaccaaacctgagtcttccatgagagcagaactcactgtgccatccctctaacttcttttctgtgttctaatcgtaatactacgcaatcatggattccacttttatggccttatcaaattttgttgagttttcaaaatctccaacataatccaatttatgtcccctcctccttcaaacttcataaaaatattcccatggatactcaaagggtacaaaccctgctgcagtcacgtcagtgggtatacatgtataggaagggagagttttggaggttcaatgttgatgggctcaggcatacactggactcttagaacccctgtgttgtatgagttggtgtgagatcattgtatagaaagtgaggcatgagctgtgagttctgtcttcagaatatctgaatttataagcattaagtgtcttgaatgccaagggtacagtaaagtgaagggatgcaagctaagtgaaccatcatcccctgaagaaacctacagttcaatatcctgtctctcacaatattatcaaaacttccagatggcttcttgagactcagactagtgaacttcatctccagagtctggcatttaagagatctagattggggttgtacaattttagtttctaacatgtttggagtatttctcctcctggaccagatattgagagccactcatcaggtgagcaatgtgagaaatcatatctcacatctgaaccaaagagacagaaagatagagaagaccaagttagcctcaaaagatgttctacccagagcaagatgctctttccagagcacagctgtgatgggttttggattacctttatcaaagtcatttgtgggtcatacctcacagccttacaacatctattttgaaatatattagacttatatgagtgtgaaaacatatactacatggagcagtgtgactaagtgaagcatctaatatgtaattccgtattgggataatctcccttgccagtcttcatgggcagatagcatgtaaaagccttgtccacggaacatcatttattgtactggactccataaaagtggtcttgaccagtgcttgtttgtgagataccaggttctttgaagcagtttcaaattgtttaatcatttaagaatgcattctgagtgttttggtcagatcagaacttaccatggatcaaaagatcacaaaggaagaaaactagcttgaacctgagccagactgcgtgatgtggtttccttctacaccgtttctgccttacttacatgcatcactggtacattttggactggattcttcagttctgtcttatcagtccattacatgcaagtacgtggtccagtttttaagaaggcacacccttaacatcagacacatattctttgtgtaaaacatttgtgctaaagacttgaaagaattcttgaagactcaaattctcattccaggtctcattaaaagtctttagatctatgcaggtacctggcatgaagtttcattttgacagtttgcctcctaatttatcaaagcttttgtaggccttctattgagagacagacatgggttgcttcagggtgccattatcttaaaggaatgcacccactcatgactggggtagaatggcatgacatttatctgtactaatcttgcaattctccattataatcagatacaaaaaaagcacaagggacttgtcctttctggtaaactcagttctacattaggttcttctcctttgaagaacctacaggatcaggtcttgtattgtcatcctctggtttgctactgtgaagagaatgaagttgagttagaaaaggagttactttaagttttatgcatttcaacactggaagatgtactctacatgaacaactgtttctggagcactggagtttactatgatgttctgtcttgttacctttcagtgttgtaagggactgataaagcaaatctctcaatttttggcaaattaaacacatcacattcttagacaattgctcctatgatattacctcctcacttaataacatctttagtttctcataatttccaggtgccttctctggtagaatgtgaaccccagtacttttctgtgtcacagtggcatgttttatcttctgaactttgacctcattattttcaaatattccaatttgcctttacataccgtatgtttagatattaattaacaaataattcacatatcaatgaaagtataagaaggatgagaaggaggaagaaaattagaaatatgggaatacctgtctattacctactttctaaaaaggattataaacgtcagagagagactacaaccgtgtcttatatcataaggactgtcctggtaggtgatatgtaccagttggcatttgccatctctatttgtcaagatagatttttaaaagctggttgtgataaatgaaaggaaatatagtatttctatatttgaaccaatttgttcatttgcaggcagctgctcctgattgtgtctttgcctgtccattgagtctggaatctatctcatttaggattctaatttagtctttcaatttttatttcacataggtatatttaagtatgtgtgtacttgcatttttatcatttaatcatttaatgtcattttcttgctttgctttttaaaaaaaaatgaagccatctgtttagtcaacatgcaaaattgatgaatataaaactcaaaaagttcataatgacaactaaataacagatgacaaattagataagaacaagtcattaagttggcctataaaaggacagccatctgtgatactaaagcatcttcctattgatgacagtgatcatctcccaagttcatgacagcaaagaatttatagaagaagatgagaagcttgtaaattgagaagtccaaatggatgctgggccatcagtgggactattttgtcccagtgcggtatgacaagtgaatacagatcctaagacagttctttgagagcgggcagtattttgttaggctgttcttgtggatagccatggaggtaattgtatttgatgttaattctattctcctgtgaggggctgtgaacaaggaatgagtcagcactcaggtgattcccagtataccttcttcccatcttaatttataaataaaggctagagctggtgattggatagagaaagaggggaaggtggagctgaaggttttatgggagaaagagagagaggatgacagaggaggaggaagaaggacggtagagcagaagcacctggcctggaaaaaccacaagttctaagggatctcttatatggggaagatggtagtgtaatggtagatctgcccaatcgaggcccacagcatgtattcatattaattgagttgtgttttcattgcctgggcttatttgagttggaaatttaccacaataggctgtgttattggtttaaaagatttttaaatttcttacaagtctcttattgagcttacagaaaactgatttatacttatcctaagttctaagctcagtttagcagtgtaaggtataataatcagagaaccacagaagtgaaaggtccacagggccataggggccaccttgttgcacccatgccatcaagactgagtcattttacactcactaacaaagtaccaaacgatgccaagaacaaacagaaatgtggatttttatagataatagcatatgttcagtactagtcaacaattcaggccacatgtatgtacaggtagatatatatggttaattgaggaaatgcataaatgcatgtctaccaacagaaaccagactgaatcagctgactttcatatgaaattctatgttctctcatatgaaaaattctgtttcagcagtagactaaccttgatcatgttaaatggatttgatgtctgatctttaaagtggtccttttgttaggattaaatttggtgagtgactttgctagtcttgcattctaattctaataatctgtttcttcatgccctttgagcagtgatattctaactgatgctcacagaacgaaatgttgaggttggattgggtttgagacttaagaataatttgaccaggagattttaaagaccaagactgtatgtggagggacatgaagagcgtcatgtcttccagtcctgtgtcgtacattttccacatttcccttgtcccgctggaccacacatgtatgaaacatgtagaacaaaggaaatgaagcactaacacatctgcccttcatgagtagtgatttacatcattttaagtacagaatacctttgatatgcacttctacattttaaaagtataatagtatttgtatttaaacatatttggtacctacatcttttctacttcattgtattgccaatggcattaaaatggtattattcatgagacattttattgtgtcatgtgcctttttaattttggcagatctttatcatggtatctttacattttttttttcatggcagaatgaccttagcatgcaaattgctgaacatctttgaatgtttccatggagatgtagttggtaagccagacaggatacatgtacaagtttatcaaggcttttgttgcctattactacagttttctccagcagaaaacctcattgtgttatgaatgtcttctttgcacatttcttagtataattattaaaaaaaataacccatgactttaattgtgactatgatatctcaaattaatttgaattatttctctcctaagattgtcctttttaaaatttcttttcagccacttgaatatttttgtatgaattgcctagttttatttgtgctcttaatatctagagttgattttagtattaatttgtaactcctttttcatattaaagctcttgggcttgcaaaatgtcatatgtttgcaaaacaaaaagggcttgcttctttgtttgattaatgctattatgccaaacagtattcatgcctaatttgttgtctaaattgattgaacaaagagagtaattcagacttagactggccagcaggaggagatacagtatacctgctctgaggtcaggcccactgtgctctggggaaaagggaaacttctttaggccgttttaaatcttcatcctttgcagcatgtggcagagtactgatggtctattccagcaaacatggaactcacagtattcttggaatggttcatcaatgtctaaccactgaaatccttacagacagaacttcccttgtgaacagaagagcacatggatcctaaagttcaggagcaattggacagggtgggtgaggaagagaggaagtatttattttcctagtaaatagtcctgaattttctctgtcattgaaatgttccataaagttcccaaaagatgggcccataatagaaattcaagaataaaatcataccagggagacagatctaatgggtttaagtggttgttgcacaggtgtgaaggagagagttcagatgtcagaagctgggtaaattgtgtgtgtgtgggggtggggggtgggcatggtagcttgcacaaaaggaagacagagacagaagatcctgcaacaagcaaaacagccttattggggaattccaccttcaaatgagaaacaatcaatgtaaggtggagatccagaaagacccatggtccaccctcaggcctgcatgtgcatatgcgcaggtgtacatgtatctgaacacatgtgtgttcacacatacacacacacatatgtacataagcacactttacacacatgcacattaataaaaatcagttgccttgaagtgccttcgcgaagaatgtttacaagtttatatcattgcacttttgaaacattgtgaacaaaccaaagtggttcattgaaaactaaggctgtctggtgtgccacctgttgtgttatcgagcgctgattgacactgaagtgtgagctgagttgtaggaccactctgaccagaaggagctagtcccacaggatatgccttattttttagcacctaaagaaactgggtgagtatgtttctcagaataaatttttcagaataaatgtttttagaaaaaaaaacccaacaacaacccactgttctttatgttaaagctatgcaatatgtgaaaacatttaacagctgggaagattggagacctatgatacttcttccaattcttaacatgtgttaggttgtaaattttttagtttccaattgttctgtgttcttttatctttgaagacccctgcctcaggctttgagctaaaggatttagtgtttaaacgcttttagcatctttctgcctacattatctaagttttttgttaaaggattccctcccagcttcttatacactaccaggtaacagatttcttttattttctctttaatagcatttatcaggcacgttctgtaggcagaatactctcaagtgctagaaatacaaaaatgagagtcataattgcatatttcagatagcaattatgacagtagataagacagtctccaaaagaggtagttctatcacaggaaacctgacagttgtgcaggttgttaccaaaacagcaagggttgttgggtttgccaggtctccttaaagcagtggttcttaaccttcccaatgccgtgaccctttcatagacttctccatgttgtggtgacccccaacaataaaattttatttttattgctactttataactataattttgctactcttatgaattataatataaatatctctctaatgtaaatcacctcttaggtgacctctatgaaagagttgttccaccctagaaaggggtcgagacccacagattgggaacctctactgtaatgtcagggctttaaagcaaaatctttatgggcatactcattggtcatgtttaggcttagaaaataaagagaatgctgtgtgtatcagtatatatgcaatttgttggttttgtaagttaaatataattaaacaccaacaacccaaataacccaattaaaaaataggaaacagagctaaacagaattctcaacagaggaatctctaatcgctgagaaacacttaaagaaatattcaacatacttagtcatcaggaaaatgcaaatcaaaatgaacctgagattttaccttacaccaatcagaatggctaagatcaaaaactcaagtgacaacacatgctgtcactcctcaggtaggagagggggcaaggaggggaattgcagtggcgatccagtatgagcagagcaggagtgaggggtgagagggcttggagagagaaatcattggtgagggaaatctctgggacaagataagaataggaaatgacaaagatcattggtaacatctctgccagatttcattattagactgagtaggctatattttcattttattctccatcttttaaaaaacggtttgttttttaaagtatagcgtaagagggcagatgaattggcagtaactagagtaccagctgcagtgctgggaagtgactgggaactgactgggaccatggactgcagtttcaagtgtcccaggttgaagagtattacaaaagtcctgtatgagtcctcttgcctctcctcacactatattgttcttcacttattatattgtatctcatttaaatcatccattattttatttatgatcatgtaacatcttattctagctttgaacatgacaggtgattctgctcctttatcatcatcatacaaggcgacttcctaactcgaagatattggtctcctatgacctaaagaccttgtattataatgtcattctgtgaatcacttccttcactaaccaagtcttattagggaaaataaaagtcggctgagctaagcaatgtgtgtagtactgtggttgacatttggtagaaggttctttgtgttaattatctattgctatgtagcaacccacatttattggtataaaacaaggcatgtttttcccttacagtttgagtgaaattcaggtgttgaaagcattcaggggctgcagttggaagatagctatcaatttgagatgggcctggcctatactatagaaacctttatgtacacccacactctaaaaacaaacctacactatcaggctttcctccacattttttgtaggggaaatgaggtagccactaagcagcatggattggaaaaggtctttcagcttccattggttactggttaaattcagttgcttgcgagtttgggactcaagagcacttgcttcttcaagtgtaactagtgagaaagaccccacagtgagcttttcataaactggggcctgccatgagcactctgttacctttccatgttctcctcttccaaaccaagaagaagggttatgtacaaggccatgaatactgcaaagaatggcaggggttatccatccttcatacttactgttttcaagccagggacaaaaataggttgcagggtgccagaagttctagccatgttttaactagagagcccaatgcaagatttaagtaggaagatagccagtctgagggcaatctaagctacacaataaaagtatattacacaccatttctttatctgctcatcccacataatcctgtatctttctaaatatgtaggacatgtgtggaaaattagcagattagacattgaattcagaagtcttataattgcttccctgttagtatctaacatttaaaatttcagaagatgtgtatatgtctgcttctgcttttgtttcttagatgaaaaagtgactccaataccctttaaacttgctatgcagctcagagtttctgatcctcctgcctaagagtataaaagcatcaagcacctgtctgttttatatggttctgtcaatagaacctctggccttgtacatggtaggcatgtactctcctgagttacgacacctctcgtacaagtcttatttatattttctcattaaaaagtggggcacaaataatgctttattaatggctttagtaaaaaacagtgctgttttgatttgtatacaacttgctccactatttgtagagaataagtctctttacagagaacaatggtaatgtgtgaatgtgttagatgttgaataatgcacaatgaaaacgtgcccactgctcatacttctgtagtgttttgcaatcgtcgtgtaggtgactctttttttgttgtttcttgtttttttttttttttttttggttttttgggctttttttttggtttttcgagacagggtttctctgtatagccctggctgtcctggaactcactttgtagaccaggctggccttgaactcagagatccacctagctctgcctcccaagtgctgggatcaaaggcatgcaccaccacgccctgctccgtgtaggtgactcttttgacatcagcaaaattcattcacatgttggtggcttcactggctagtgaagatcaaagatgatctaaactattgtccttggctgtcttcgctgtcttccaagtgtttctcatcctccagcaatccaggccaggcatacttccacattgataaagagaggaggagccatgccccaacaggtaagaaggacacatgctccactatgttcatagcagccttatttataatagccagaagctggaaagaacctagatgcccctcaacagaggaatggatacagaaaatgtggtacatctacacaatggagtactactcagctattaaaaagaatgaatttatgaagttcctagccaaatggatggacctggagggcatcatcctgagtgaggtaacacattcacaaagaaactcacacaatatgtattcactgataagtggatattagccccaaacctaggatacccaagatataagatataatttgttaaacacatgaaactcaagaagaatgaagactgaagtgtggacactatgcccctccttagatttgggaacaaaacacccatggaaggagttacagagccaaagtttggagctgagatgaaaggatggaccatgtagagactgccatatccagggatccaccccataatcagcatccaaacgctgacaccattgcatacactagcaagattttattgaaaggacccagatgtagctgtctcttgtgagactatgccggggcctagcaaacacagaagtggatgctcacagtcagctaatggatggatcatagggctcccaatggaggagctagagaaagtagccaaggagctaaagggatctgcaaccctataggtggaacaacattatgaactaaccagtaccccggagctcttgactctagctgcatatatatcaaaagatggcctagtcggccatcactggaaagagaggcccattggacttgcaaactttatatgccccagtacaggggaacaccagggccaaaaagggggagtgggtgggcaggggagtgagggtgggtggatatgggggacttttggtatagcattggaaatgtaaatgagttaaatacctaataaaaaatggaaaaaaaaaagaaaacagtatcagccatgagaagaaaaaaaaaaaatatatatatatatatatatatatacacacacacacacacactaaaaaaaaaaaaaaaaaaaaaaaaaagaaaaaaaaaaagagaggaggagccaagcagaggtagccagtgcttttcaggcctctggaggattgtttgctagtgtggcactgactaaatcaaagtcacatagatgatccaagtaagtcaggctgagagagaaagctcagtgcaagaacactcactggaagatggccccgcatgcggatcttcatctgtggacacgtgcccaagcctgaggtctggcccaagggtacttagtgagcatgcagatatggttctaaatagctgtctcagaactagaaaactaagcccttctaaagaattagatggtagatacttagctttctattttttaaattgggacttattttctgtgggagaaaaaaaaatccttgtttttaatatagtctctgagaccttagaaactcttcccaaggtaacttgtgaaacactctggcagtgttggaaaggtgatgcccattgctgtttgttgttttgctcaaaggtagaaatactcgattttttttaaatgaaggaataattatattctaaaagctccttttgtttaagtagcacctgttgtccatttaattatacatcattgttggacagatgtcattcaaccttcaggtgtggaaagatgctagagactttgtgtctctgctgcaaggggtaaacagacactgtttgggtgttggttagtggctgctggctgctgctttttattcttaggctttgggatgagttatttttgccactgtactataagttgttcctctaactggaaagactcatatgtccagtagatgacacaaccatacataagaggaacaaatcagtgatttgaacacagattcagtgtcttaaatttgacttcaaatggaagaatcttcttggggatatggaaaaaaattccttcttaataaataccccattcctgttactatagccattcgcatctacagtaacattggtgtgaaagtattacagttttgttttggtaaattgcatgagtaatcgccccccccccccagcacttgctaagttgctgtttcctgttttaatggctgtaatatatttgtaaacatgtttctaacttactagaaaacatgttggttccatctcatttattcgcagacaacttactgtctgttgaatcctttgcttcttttttttctaatgactcctttgaaatattattttaatgaacccatgaaacacatcattgtattccgtatattgtggttggactgctaatgagactcatccattaagtaaatggctttgtaggcaatgcaaatgtaataaataaagttagtctgcacgtcttgctacgttcttgctgatgggcataccacatactgagaaggtaatgtttcatgaccaggacagttcaattggcaggcagattgggaatctttgcatgaaaaaaaatgaagaatatcataaaaacatagttgcaagtcgatttttactaatcagaagataatgtattttgagttaaagatgttctagttcaagatgatatgccaatagacggcattaagtatgcatatatccatagaaaaatgtgcttctttgtaaataaaggggaaggaaaatctattgaaaaatctgcccctataaacctgctatgtgtgtgtgtgtgagtgtgtgtgtgtgtgtgtgtgtgtgtgtgtgtgtgtgttacgacaaatctgggtatcagtacttccccactaccttaactgaggtcagcttgctctttggttgtttgttgctgtatatgcaactttgaccttctggggatttctcggtctcacatcctatctcagcacgaggccactgatgttacatctagatttgcatggcttctgagaatttgaactcaagctctcatgcattgtacacggaagccctgtccctgaccagagaaataaaaacaaaaattagggaagcaatttttacaaaacaaactacatcaaaatactgaactttggtcactttttatttagcaacagtgtgagctttgatttttctgtcttacatataaggcaccatcagtgttagagttctcttccataccccatttctataggatgctgttgtaactatcaattccccttttgatatctcatttttctatcttgtttgcacaaaaatgtttggaacctttaccatttagtgtcttcttggtaaaacctattgtgattagtattttcttcatttctatatttgtttttttaattttttattacatattttcttcatttacatttcaaatgctatcccaaaagtcccctatatcctcccctgccctgctcccctacccacccactcccacttcttggccctcatgttcccccttactgaggcatataaagtttgctagaccaacgggcctctcttcccagtgatggctgactaggccatcttctgccacatatgcagctttaagtgggtttctttttcatttagagaaatagtcttacagatacttatgaatctaggcccttttcccctctgtaacttccctgacaagccacaaattcaacatgttttcttctcacaaatttgaagagctctctaaaaaaatcaaacctcctgctatttctgtagtatttcctcacttttcctaactcatgacggttgcctttacacgctcaagaaatagcttaacctgaaataatttttagggtgtacatacattgtcaaagatacggacttgtggaatttattttctgctgtgctgccatgggtgtgcacctcaatctgttcccacacaaggtaagaacttcctgatgacacagagagaaaatagatgtgaagtacaagtatttgcaggcattaggtgcctaacgttcactcttagaagtttttagtagtgctatctttattaaacacatctcattttgtgtgcttgctaatgtcttggcagaacacacacacacacacacacaagcacgcatgtgtgcacatacactgtagaaatgttactataaggaagagaatggagaagtattaggagttcatagtaaaattgccttctttaagtaaaggcagaaaacaagtatgttcttgaaatgattaattggttattaaaggacttattctgaggatctgctaagccactcaacagtaatttaaagttggcaacctgttaacagttccccgtctgctccactgaggttggccagatcctgttggaaaactgtagttatggagtttgaaagcaaagtgcaaaatggcatccttaaaaattggagctgtcgcattaaattatgtcacatgtgatggcaggttacaagagaaagtgatacaggattttataaacacaagccactggaagctcactcaatggtattctagatgcccactgttattagaagtctctttctgtccaaacttagtggaattcagagctttcaccaaggaaagctgaactaggaaagaaaagtttattgttagaaacgatcctattcatgaagacttagactatagatggataagctggctattctaccgtagggcaacatatttcacattacagcttagatcatcttaaagaaaagagacattatgagtttggctacagaaatcctgacagggagcattgggaaatgtagagcagcattaataacttatcagtgacagtgtgtcaaacctttctttctccaatgctgcagatggaactgaataatgtggtgggatggataagtgtgagctgcctagaagtatctcccttctaactgcctgatacccttaactctaaggcctgctgctagggaagttgactgttataagaaggttgcttttagatacatatatcctctccccactctgtccacccatgcctttgatctcctattcttacagatgtacagaaacttcagaattcaataaatacagaggtaaaaatctcctcacaaatattagtaccacttttgtgggtattctcagtagtgaagtattcagaatgggccgttctgctgcttttttctagtatattaagctgcattttgacagaccatatagacggcatgattaattacacaaagtcaaatatataaaattatattcacttgctggaatttaatttcttattttagaaacccatgctgtcaggttaatggaaaggaattttattgttttatgaattccacttaatttttcccttggcaatatgtgttctagcaatagaacaacatcaaatctggtccaccctgatatgcaggagacaggtactagttttcttacatcttctctgggagttcagtggcagctcttagaccgcccccaggttgctgttgtccactcaacctttggggctggaggattctatgccacccatgattgttgtagggtaatgcagctttctttctcctgtattcatccgttctcatgatgacttagggtatgactatgacattcacacagtcttgaaagcaaaacaccagaagacaacatagcagtctatgcaatgtctcagctggcacctgactttcaggactgcaacccatatgtcaaagctgggtccatcacacaaacttgtaattccagcatgggtgtagaaaacaagatccctggacctgcaggtcaataatgctagcttaattggtaacctccagaccaatgagacatactgtctcaaaagaagtaaggcagcatttctgataatgctacaggtcatttttagcacatgcacgcatgcacacacacacttctctctctcctctgtctgtttctcaaatgcatctaaataaatatgcatgccttctatgttgttcatttgtttttttctgctagggttggtgatgtaggaagggaccaggaccatttcctatataactcttttctcttatgtaactctttttctttgatgttttatcctttttttttattttcagactgagctagagactcattctttttttcactatgtcatctttgtcctttttatctctaggatcttgacagagggagcgttgatatacacataagccacactcttaagcacagtgttgagttttgctttgttttaggaaggttaagacaactgagttcattttctgaagtattaggtgttaatccacaaatgctagtgagacatactagtttgctctcttgccatatttccagtggcttttgtgtggtccaggtccctgaataaggagtaaggacaaagaggacagagcaggtatgtagggatgcctcttggttgtcatcataaacacatctccactagctcatgttctcttttagaggctgtcgctcttgttttcatgggagaagtcaggagtgcatagttcactgtatattaatatcagcttgtaggaaaaccaaacagctcttctctggtgaaactcatggtgcaacctaaaataatatagacaaaaatgaaaagaataatgctgaatttctctcttacttaagcagctaataaaagtatgcacattcccatttccctccctacttcttgtaatatctttggttaaaatggaatttgtctaattatcaatttccaatgtcaccagatggtattttttttaacttcctctgagagttagttaaattgttgactcaccattaaaaattacaactttgtaaatctcaaatttttactgttttccacattggctttaagtcatcagattccatttgatgagagttgacaagctgtcatttaatgtcctcatgtaactcaccttgatgtggctgtgatgaggatgtccaatctgtttagaacatccttataaggctatacagtccatgtgcctcctaaattgttatggtttggcttttttgagtgtaggacactacactacaaaacctatatgcacttaatagaacttatacctggaactttgaagtttgatctttttccagactatctgctatatgagtaaactgtcctatgataccagacataggtagtaagtttagcttccagaaacaactggtgctgtgcaactgactgtgttgttaatgacctgtaatgtttattaggctgtgtgtcctcaacacactgccatctgcaatactttcaacttccaatggatttatgtggtatacagcttcctcataaatcaggagcatctgcacttagatatgcttacaatcccataccatgtatattttccacggattattttttttaaatcagctgggaatggagctttgtgatacattgtttgaggcctaggtttgattttcaacatagagaagaaaaattagcatttatagtccaaacatcaaggatccacaaacccaaggcaagactctcagatgttctctcagcctgatgaagggattagctcatcttttcagtgcctttgaaatcatgttgagagatcagctgtctgctatgctatccaaagagctctttctgctctttaaatgtagccctgctatatgtccgagaccaacccagccagttgttaagcatcttctcaggaaccttccacacagcctttgcctactgctctctaaaatacaaagacaggaggaaaagccattctatctaacccactgtagtaacggcatgagtcaccctaactctggagttagggaaagatggatatttcttataagacaaactgaacagtagcatccttctcagaattaagcacctttcatctgggagaagctatctaaaaagatggacgagcaatacagagcatgtcatttccagtgtgtggatactcacagaatttcaaatgcactaaagattttggtagaaagttataattcatgaatgaagtttttttccattcgattaattatccctagattatagcttttgtctctttgtatactggcttcaatagagttcatgtgtcttgggcttaaaacacagcattggcgttgagcagattttaattactccattttaaaactcaatacaatattttaaaacattttttttttaaaaattaacgtatgactacaaaagaaaacaagccttaatacatgccatataaactaaggtggtatgtggacatacctagctcaaaacatcacaagtccatgtggactaaaagcaaatattctctttcaataattaagtgattaccaacagtccatcgttgtgaatattttgacattttgcttaaaatattctctggtggtttcctttgtatacacttcatctttctaatctagtgtttgaagttcatatctgtcccatccttggtctcttaagaacaaggaataacctttcgcctgcaattggcaagcatggaagaagttgggcataagattaagagtctagagcagtggtggtgggatactgatttgctgattctgattgtaaaaagatagtgtgtgcttactcactgtgcagagtcttgaaggaagcttgcatatgctcttcttattcatagaaacacacagattcatcttcaacttcaatttcaaatgtccctttgtatgtagacttttgcagagactttagtgatgtatttaagaactttaggtttcagtgtagtaagcatatctgtgtaaaaagctcctttgccttaattgataggcagaacaactgaactcagggaacacaactattaaataaaaactctacatatccccccccacaaaagatttggagagtgaagaacctgtcccagagcacaaattgacatgtttgcatttaaaatcaaaccagaggtgtcaaaacccatctgtttagtcactgtttccagtgagtgattggcagctttcagaagctcctctttctggaacagggaggattgtgaacttttattgtattgctttgcatttggaagcttccgggaacattgagactgaacttgagtaccagcactgccagcgaatggcctcctctgcacttcctctatgcctggtttccaccaggctctggaaacaagagtgtttgagcaagattctgcacatgcatctgtttggaagcacagcatagttaatttcaggcataggagttttgattcacagctgttagaagcagggattccattcttgtcatgttggctgcaaatatttcctcccagcagatggggttcttcttgcagaggaagggaatcagattcaagagggtaaatgagagcaaggagcaggttttggtacagattggctcaggtccctgtgacaccattctgaggtgttgagagctgatgtcaaggaaaggcttgtggggagggaatgtgtgcgaaaggacaattcccacaggttcctgctgtgtgggaaggtggtactttccttgggttatgttagatgaaaactggaaatgcaattaattccatttaggcagttctctgtgttttttttttttttttaacatggatcaggcatacagtagtgaaagccaatgaaatcaaaatgagaattggaagaggaggaggagggcagagaaggaagggatcaaagaaggaagaaaggaaagaaggaagggaagtaggaagaaaggttcattgaaatccaaagaagaatatgaaaatgaaagagcaaaataattttcttttcaaatttaaatgcatacatttatatgtattttatacatgtgcttatatcatggaaccatgtgtttatatgtatgtgtttatctatatgtatatcatctatatatctgtattataataaagccaaatgtacatattcataaacatatatcataaatagtaaatataaatatgggtccatagagaacaggagttcaggattttgcttctttgtttgtttgtatgaaccaggcagtagcttctgacctccctcagtcttctccttcacaccatgttgggaaaggaagtattgtctctgtcagagaaaaggaggcatggagcatgctgctcttagtagtgtgctgacgttcagggaaggtcccgctgactcttcccctgcttctggccctctctaaggatgagatgaaggctggctgcatagctcatatttcatgtaataggcctggcacatgtgcttgtcagttctccactggcatcacaatcgtctgctatgtatcctatgttcccttgcttactgcaactgttcagagactctgcatccttcagaaaatagcatgtgctgtgtctgtcttcagggccatctgagagctctagaaaccggaaggccgcatgtgatggccatgctctctgaactcgttttcaaaagctaacctgcgatgaagctgcttcctgtcatttggaggtatgagaaaatgttgtatctatttgaatatttaagatattgtagtctctaaatgttttgaataatttatagagactgagttttggttgcatagttttgtgggtaagatcgtacactgatggcttctaacatattacacaagaatttggataatattggttaatagaacaactatacttttgcaatggaatatgttgggattctaggagtttcctgtgattaatcacattagttcagcataaatctatactcttctttttaaaaacgtctctgaaaaataaatttcatctgcctcccagtgcatcttgggaatgaaacttctctccagggctctacgtaaatgggtgaaaaaaaactattttgaaaccttgtcttgcaaatgagaaattgggttttttattttatttcttaacagactggtggaattgcctgggcttgacaagaatatgtgattacatactgtgagctagacggcagggcctttacaatgttccaagtctggttgtacagtgttcaagaatacaagctgttttgtgtttgaggtctttctgtatcataggccctcatggcctatacttttccatctctgaaatcttggaaatcaatttcatgccatctccaagaaagtcttgactgtatcttttgcatttcaatatactttctcagtatcatagctgggcttatcagagaccatcgttttcagataatacatacagtgaacatgagtaacttgtcatctatggaagcagactgtgggagatatgggaagtttgtggtatttttgctatagtttggaggtatttttcttgaggtatacttgcctgcatatgtaggataaaatgtatgtagcacttgtaaatagcaaagaggagcagaaaaagaatgactgagctggttgtgcaggcacgtgcttggcatctcagcactaggaatgcggaggcagggggacttccacaagttgcattccaagcaggactacaaggtgacaggtactttccaacaatcagtaaataaataaccttttacattctggggggaaaaggataatggttgccttaattattccttcaggtagatttaacattatctcatttaggctttgaaaatcaggagcctctggtagacgtggccagcaatagtgaagccataaaagccaagtttttcaatttctagagaaaggctttgaactattagtctatttaggtcccaagcatggcttcaactcttcagtgagagaaaaccagtagacaacctgatctcctcattctttcataaactgctatttggagagagagagagagagagagagagagagagagagagagagagagagagagagagagagagagagagagagatctgtcaattattttactttctagttacacctctaagtctgacaaatgagattacccaagggccactgaaaatacccctatgtttggtttgtcacaatgcaactgcagtgatgtgttttcctctgaattcatctctatcttccctttagtcacttgcctttctccatgctgtgggcttctctcttcattttctgggttgctagcttactgcctgtcattctatacttcagtgttcttcatcgcagctgcctgtagtgttgtattctacatgaaccatgctcactgagactgagggagtgaacttctaatttttgctaactttatttaattttactaagcatgtttaacttgggaaacatatattgggtagcaaagatttagttggttttcacagctgtgttgatgcttgtgaataaaatataacaaatgggatcttgaaattactaagaaaactaaactatgttcaagaagagatttctacttctcctcctcccttcctcctcttcctcctcttcttctgcatcatcagtgtgtgtgtgtgtgtgtgtgtgtgtgtgtgtgtgtgtgtgtgtgtgcatattgtgatgttttctaagcatattcctggagcaatgtgtatttgaaactccaaggataacattgggaacatgactgtctccttctgcttgtacatggatttaggtactgagcccctgtcatctgcctgtgcagcaatcacttttacctgtaaagccgtctcatcatccccaagacctctaacagtttgactttttaacaagtttttgggcctaaccatatatctacttcataactgccaaggagaagaaatatttgtctaaaagttcctttgggtcagggttttgtctaggcctggactggttcatttgcttctaaattctccaaacacaagccctctgtgtttgccatattgcaggagtagtgacaagcagtcagccagaaagcaagctggcttggttctgattctcagcgtacacacggaagcacagcttgccaccaatgtcaaacatgtggggaaaactcagggaggatttctttctttcatgattgatgaaacttggtgatatgtggaaaaccaggccaacagctgctgttatctgaaaaaatcagtactagagaaggcatgcatcttctgttttatctgtcagattatatcctaggtcgaaaagagtgtatttcattgagaaaaatataattagcaatttgacatactcaagcctgttatttacaacttcaagaataatatcctttaaaaacatactataccaaaactattaaggaggagtagaacacaagtcatatagaatttatttttcccagaggacacaggaaaaagtaaaagaagatggaattaaatttagtgtattcaacttataacatctaatattcttaatatgtagctagtataaagagttagtgagatagcttgtgtcctttctgactgtgatgagtctttggaatccaaggtgcatttaatgtttcgggagtgtgatctggaagagctatcaagggcagaatgatgacatgaagacagcggtgatgctattggatagtgtggagtctacatacttcttggggccagtaaattgtgttgggatctctaggtttgtttgccaatagataagttagaacttgtcaaactctaagccttgagtgtccactctactgtctgttacatttgtattttatctgaaagattatctagatttttgctacagttcaaggttttatatgttgtgacaacttctgaagacattttgaatatttttgctattatacattttcaagtatttaaaccataaaaatgctgttttctcgtgacatacactctgtttctttgctaaacatagattatcttatgaaagtaaaatcattttgttatattcttcttaaatccaacatttaaaaaaactataaactcaaaattttatacatctattatttatttgaaaagatttaagtctgtatgtctatgtatatatgtagttttgtttatatgtgtctctatgtctctgtgtgtatgtgtctctgtgtatgtatttgtacacctctatgtgtatgggtgtgttcgtatttatgtgtgtgtgtgagtgtgtatgtatgagtatttctgtgtgtgtgtgtgtgtgtgtgtgtgtgtatttctctgtgtgtgtgtgtgtgtgcacgtgtgtgtagtcttggagatgaagttcttattcattgccaagctcatctcaaactcctagcttacctgagtttcctgcctcagcttcccaggcacctggagctccagctgcttgcaaccatgcctggccacattgcctaagattacaaaacaaagcaattatagcataatgcactttgattactagttctgatcatcattaaatgtgattatgtaataattttgtcagtcaaatccatagttttgaaaataagttttgtgtggccacgttgcttatggttagtttctgttcttgtgaggaaactaattttaaaatttcttaatatattcatacaatcacttgcctgttggtaaaaaaaaaaaagtcaatgcagagagtacagtcagctggtataatcaatttaaaagctacatttatatatgtgtgtgtgcatgcatgtgtgtgtgtgtgtctatgtgtgtctttatgtatgtatctgccaggacatgtgtgttaaagtcacagttcaacttgtaggatttggttttctcctttttgccttatgagtcacaagtatggaattcaggtaaacatgtttgctatgtggctgtaagtacctttacctgctggcccaaagtacaattttttaaaagtgaaacttaaagtgaagtctgaaatttaaacacagcttactttctgtcttgaaacatatattctttcatacactttgattttcttaagagtttgttgtgttactaggtagttcgaattctgattttgttccttttaaaatcactcaaccttatttgtctttgaaaaataatgataaagccttgaagaaagttggcactcagtaattagtgtttggatggatgtacagtaaatcactgtatatacagccaagagtagcccagtgtatatgtgtaattgctacaaattgaatagaatcatgatgataagaaatatatgtagggggatatctgtctagaaatataaaatactggatgaaatagaattagtatatgtattataggtctgtttcagttttttcttttgaaatttcccataatttggagaaattctacaacaagtaaagatgctttaacacttaagttggttggaactaagagagctggagtgttttgttttgttttgtttttctattattagaagagattgtactagctgtttcaacaatatgcctttttcagttcctagggcaaaccaagtgtatctccttcttggactccgttagaaacatgggatgtatggtttctttggggaagagctgaatagtttatatctcagatggtacctttgtttctccctcttgactcatgggaaagtaagaagacaattaaattgattttaaatcacatttagcattatgtattgattagatacaagtgctctgaagtaaatgtcacattgttcagctccaaaaagcatctatatcggataacagaagcaatatgagctttcatttctgttaagtaattcagccgatgttataagtcatgagagtgagatctgcatggctagtaaatggctcccaaaccttgttattgaagtgcagccttcaattcgctttattagcttgtttcttattctcatttatattttattaccttggaacacagacataggatcctggaaatggagttttctttaaataaattgttcctaaggtttctgaagtcttttgttcagtgatgtctaggagcagacatactgtcggccaagccaggttctcagataaagaagggtaaaaatattcttctgagttggctgagataggatttcagcttctctgactttatttatgttgtcatcatttgtggggagcacattcttggttatactgaagagtcaaagaatggcttagaagactggaggttggacctgtaaagtattatgttagaaatgaagttaatctcttccatagagttgtgtggtgtctgtctgtctgtttgtttaagctggaaatctttgagaaggctagaactgacaggcagatcacacaaaaagtgtacatggatatccatccgagccttttgtgtttatcagattgaatattgtgactgttcaaaccagttcacgcctgcatcaccttctggggagaataatgtaccagttcaccttggctttatcagtttctgttttagtgtgttgtcactctgcttctttatccaccagtttctttctctaatgataccatatacccaagttgcccttagtgcagatactatgtaacgtatctaggcccagtgtttatttatctagcatatgctgtagaggcaacatcacttgtgtttaaaccatatgtatgtggcagctaggctgtcccagttcaaattctgatagtatgtttagtagcctggggatcaaagatgatcctctgaatatctctgagactttccactcatctctacaatggggtgacagcagggcatgcttcccaagccatgtgtggataccaactgagtaaacacatataatatacctaacaggtagtaaaagtaataaacaataaattataaaagaattaaatgacagctgctctgccatacatttcctttgttgaactattactcgtgtttatgcttgaagtataaaaacctgttgagaactgacaagtatactcagaacactttcaacttactgtgaggatcataaactatactatcttcgaggaacatttctgtatgaatgaatgaggagtgtagaagatgccatctatacctgcctaccatcccaggagagtcgatcataagggaaagtggatgcaaatggtttgtggtgggattctttactacctaaaacatgactgagtctctgtcccttatcccaaggtgattgatatggctgtggggtagatagatatatatacaggtgttctgagtagaatgtgtgtaagataccaggaaacagggaacttgttgcttaagatcacatgtgttgagtttcactatatctgtctatggaaagaaagagaaatcaggaggaaaatgaatagctaccagctactctggccagtcagtaaaggagacagttctaggtaccatgaatgaacaatacttggaaaggcctaaaaaggtagaatttgtcatgtgtgacaccagggtggcttgagcaacaggtaggcaaggcagggccgtggctaagtgtgagttgcttaggatctttccatgctgagaaatccaaaggatcctaatgtgaataggaagcccaagggattttaaacagaattgtcttcacatctgcacactggaagctgatgtctggctgtcattcagatgaccggagcaatgagttggtgtcagatcttcagcttcaaacacctccagcattgtctctgttttccaaagcagatgggaccaaggtgtttctttgggctagagacataagtagctgactcttggctgtaggtggcaagacttcattataacaggtaaaagttagattgtggacaactaaaccaaaattggtatcaatgtgtttctaatcttttgcttctgtaaagaacacagcaccacctgaaccttgtacatatatcgtttaagtgcttgtccaattatttccttaggacaaattcccagcagtggcttcagtgttttagaactattgaaaaatatatgccctctcaggaggatttggatgcctgcaatcatggtagataaagagttaccgagttttatggaggagctgaaagtgcagatgtagaaatgcaatatgcagggagcaatcatgcctgggtaggcacgcatgtctaatttttctctttggacttctttacaccactgcctctcctctctggttgctgtaagagtcaactggatgagtctctaagacagacagagtgtttgtctctaatgacaagtgcttgactgtcgcagcaaatgatgagaggccctagggagccatcaccacccacttgagagagatccatgaagggtttatgacccgtttgaatcctgattgagcatctctggcttgaccccaagggaaccaattgtgtggaatacttgctctgtcagtctgaacgatgtgcttagaattgctgagaaaactaggatcctgcttgtttgtaaaacacaaagaaaatgaagaaaaagaagacctgaaaacagaaatattttctctattctaaagccatgttggataactgcttccactctatcaataaaacctgtattttatatgttagcgtatagcattcagctggaagtaattatttggacagtagattttaaggtttttatatcaaataaaaggattttatgtctttcctttttgtgccttgtcgataatagctacatttccttatcatttagcatgtaaatatttttaaagacaagcattgttcactagtgattctaaagctcgagtctgtccagtcttctgggtttcttaagttgtgactgtggcgggacaatgctcacaaggcaggacaaaatgtgaccataaagaagagatggtgagcaggtctttaaaaaacctgttgctctttgcacaaacactcttgagtaaaggcagacatgcaaatgactacctttgcctcctgtagcaagctacccacctacttcctctgcatccaaataattacctaactttgtgactgtgacatatagctgatgctatcagctaggtcaacatcatgaccacaggttatagccctgttaggataagcaaaatattaatgtccactatttgcttttctttttttcccttagatatatggccattttggaactctttttttttattattattagatattttcttcatttacatttcaaatgctatcctcaaagcccctatagcctcctagcctccgccccccccccccccccccggcctctcccagaactctttagctgtgatggaggttgcaggaggctgttttggttattaacaaaataatggctagaattcccagctagagaacagtggacacacacacacacacacacacacagagaaaaagagagagagaaagagagaaagagagagagagagagagggagagagagagagattaaatattaaaatgtttttcaaaattaaaagaaaaagattgtatgaaacttgtatgtaagtaggtacacggaatgtcaatactgttcattgaacagtgtattttaatttgaaagaaacagctatttgtcatgattcttgtccttgagttggcatttaccaaattaaatgcatatgaaattcaaaaggctttatactaggggatagtaattttcctgggttgtttttaaagttggtgagataaaagaattccaccaagcagataacagatggatttcttccattgtgtactgatgttctgaactaactaatttcacaatggttatttgtcaagtgtacattgtaatttgaaaattaaaggtgctgtcttctatttatttctgattctagaggtaatactagctccaataaataaataaataaataaataaataaatgcatacatacatacatacatacatacatacatacatatatatatactgttacctgggtgtgggaaattgaccctgtaaaacaccctgacataaattaaaacacagctttggtttagtgtaagtcctggaatatgggttcaacacaaggggatgtgagccagttattggtggggccttctgtgatctgctctaaaacttcttcctgagcattttatttttgtacttacaaagacagactggtttcttcctcatgttaactggccaattatttaaagtttttcagcatgtaatatttctttctctctgtctgtctgtctatctgtctgtctctgtgtgtgtgtgtgtgtgtatgtgtatgtatacatgtgacaatcgaggtgtgtagtgaaaagactggcccaggaactttgggaaggtcatggaacactcacccctccagaagggagaggctaattaacattcctcagcccacagggtcggaactgacctgtgggtggggacacattccacaggacagaccaatgcctacctaccttcagacaagggaagtccttgtcacctcattccctaaagaccaatcagtttaaagggtgcactgttctgccgatcatattgtgcctagttgttgatgctctattctgcccctgaaaaccatataaaaactcgccaaacgggtgctgggggctgccacctcttcttaaggaccccagtgcactggaacaataaatccctcttgctttttgcatctatcccagctccaagaggttcactcagggggtccccagtaagctaaggctccccagagtcttacagtagaaactggttggagttagcttctcctgcctgataggtcctgaggattgaactccggtaataaggcctgacagcaaatgcccttagctgcccagcatgccactgccaccagcattccttgctttaccccatcctgcatcaatctggtgagttcagatttcttttctagacaacacattccttaacccaacatccaagaaagtatgggcagtgcaatccataggacagaaatgagaagaaattggatatgaaaaaggggaatgccagggccaggaagtgggagtgagtgggttagggagcagggtgggcagacggtataggggacttttaggatagcatttgaaatgtaaatgaagaaaatatctaataaaaaaatttttaaaaagaaaggaaaagaaaagaagagaagagaaaggaagaaagaaaagaaatctgagaatcagagcatagaagtaggagattctcttctctccacaccacctccatccttctgctgtggcagtgactccttcagtagccacgactctacacaccagcccttactgctctctcggctccagagaccaatccaccatgtaggcagaccttgggatgcctttctgctgtggcttctgattgacttcctgttgcttcctgctccctgatcctttgtaaataatctctttttgtacattcctttcacgggaagcataagaattttgtttgaatttcctcggagaccttagtataatgtaactggctgttcagctaacacacagcaggtggtcttaaccttgaatatgctatagaattccatgttatttaatagtaacctacttaagctatttaataaaacccagtatctgcattataaagaaacctgtaggcgaagggctggtgtactgggtgctgggcaaatgtcctccctactgaagcagaatcaaattgcctctatgcggtgttaggatttatgtttatttacatgttaagtgcactttcggtatactccaataaaatttagtctaaatgatggttcacctttaccagcgactccctagtcattcagtaaaattgtgtgccttttcatccactggcccattcctatgtttgaaaattaagtttagctgaactacaaccatacctattcatttacatattgcccataggtattctatcccctcttgtgtcagaggtaagtagctgaaagagattgtatggcttacaaagcctaaaacatctattgtgtgccaccttgctgataaaggtggcagacccttggactagatcctggaaatatattggcaaataaggtggggaccattcatcatccatggctgggacccagatgtgaacaaacatcctaaccagctttgtggagcactttgcctgcagaagagaaagaaggctataaagaagaacagatggaaaacttgcattacctggtagagtagtaaagggagaaaaaaggctaaaggaagaaatatagggaatactgcaggggtttctgggaagtgcctacatggcagagccctttgtctaatctatctgctacagtctctgtctctgtcatggcttaccacttgtctccttttattcatgtaatatgcattgccagagcttaccgaattaaatctaacaattctaaaaagattttctttcatttctttttttctattatttaaatacacctataataataataatgataaaaactagaaaaaaactacacagccttgtcaaattatactttcaggaacatgctttatattgttgtttgttcaattttcatgtccgttgctgtgataaatgccatcactcacactttctggttacagttcctcatttcgagaaagctacacaggaagttggaggcaagaagcatttagaaatactgtatactggctgtctctctggctcacactgagagctttcctttacagccaagacctaggaataggactgcccacagtgggctggaccctcatacataaattaacaatgaagacattgacgtatagacatcatcacaggctacccaaagaccatcagtttatgccagtttaatctaaggcagttcttcagttaagattccatctttccaggtaattcaagactagttaaattgacaccataaataaatcataaaagtattttccataaagacaggtatatgtgacaatatagaagcatactttgtccttctgtcactggtcacaaataccaataattctgagcagagacaagagttctattaaataaaattgtgtatcttttaaataataaccatcgtttactgtggggtaaggctggcatgtatatggtttgaacctgcatttattggtagcccagggtcaggttcttatctgtattgtattagtgatgggaagtgccctcagatcatatctgcatgtgattccccattaattgcaaaatctaagtacaactgtgctctcatgtggctgataattacatacatttggaaacatttcaagagctattacacagtccacaatgtaagtacattcaaggaaagtataacatggttatctggggaaagaaaacctaccccatctcttccactgcaataaatgccctgctcagggagcactgtccactgatccaattttcttctgaagagtccagaacagttcaactctgtattgttaatctccttgttgccggggtattttatatttaaattttcttttactactgaagatttagcctcatatccacattattattttattcactaaaacctctattagattcaaaataaaaatacattttttagcaatagaattactttagagaagaaatttgaggaaaaaaaacatctcaaggcatttctatatgctagattattgctctgcagatctcattaatgagatttctacaagaatgaatttaaataaaatattctcactgcgggaaaaaatgtatctaagacattttgagtgttacattgtggttatagatatgtaagaaagccattttaaatatatcagattttatctagatacttatatactgcgtgttatttaatttatcaaaagtttccagtaacataaactcactatgaggcttaaggggtttaataatagtaatttaatttgagatcttctttgctttgtaaaaaaaaaaaaaaaccctctggccacttaataggatgcaataaaatgtaattgtgaaatatgttgcatgccttcccaattctacattcttagagtaagtgggttttcttctactcctctacatttttttttatattagaaaaatatggtttggtccttttttcttcccatgaaatatcagcctgtccttcaataagcactgcgaatgaaaattagggagacatattaacacacagtacaaaaaaatacatcacctctatatgaccttttatggagccagtccataaatatctgcatgtccatgggcatggaatgactttaggaatgatttgcattcaaggtaaaaggggagagacttaaatcagttgactggcacagcaactgtgcttattaaataagagtgttgccagtctagtacactgaagagcccttaaattattttctctctttcttttaacttttattgaaaaacaagttttatagatagatagagagatagatagatgatagataatgtcgtgtgtgtgtgtgtgtgtgtgtgtgaaggacaatctttacgacttggttgttaacttttaccctatagttctcacaggtggaaccccagttttcttttatggaaccccaaagcattaggttcagccgaatgcctttacctgctgagccatctctgtggtccccaaagtgactattgtcaaagaagcaaatgactaaggtataaagtgattactactctgcaggtcatctaattaacccaaatagtagatccacatacaatttttcctgccatttatgtctaacagtgcctcccagagaaccttcaggaaggggatggaggtgcagcccagctctgtgattccctcttcacctgagcagctctgtctgttgatgtaggcagatcaattacctcaacctctctagtggagccaatggaaactggttatttgtgtagaacactggctctgggatcacacttttagagatcaaatcctgttctgtccttggagaagaacaggcaaactctccttccaagtgcctcccaaggtcattgaggtctaactgagtgtgtgccttacagatctctgtgttttgcatgctgctttggtctaatagaaattgctttgaattatcagcatcactgtagctgttgctggtggtgtgattccatcaacaaaatttccatggcccagagcacatttgtaatgctatggatactggcatttctggcaagtttttgggttctttgtactacttctttaagcccttctcattagccagggggagatttttaccacctttgttgctaatcttccttaaaacagacagcatgctggcccccggctcagagcctcaggcagcagcagtagcttacagcaggtgtttagtatctgcttgtttcaaggttaacaaggttaaccatctgtagggggcactgagggttttctagagtggtagaaatggacggttgccttttcaatcacaatagtgtatggtaaactaacacaggaagtaggaaattgtggctatgagctaatcctttgggtggaagagattgctgcagcatgtgagcccagacactactgttccatctggacagcccaggatgtcccagtttccattccactctgtagtatgacataagacaggtctaatgactcagataaactcccctttccttgctctcctgggacattgctttgtggaaatctccctaacaagttaacgtataaaagggtcctgcgctaaagaagcagtcgaagctgaccagtgatgctctctcttctgattcctgaattctcatgctccaggtattcctgcaatgtgcagaaggcaaactgtgggaagttcaagcaagcaggcaatgcccgctgtcctgtaagaccaatggagttcgcatttcacatgcaatcaagtgcatactttataaacaatcaagtgaaaacttcgcaaacctagagccgcaatggcgactggtgtctattagagttgccttgtggctgcttgtgaggagataggaagtcttcactgcttactttgaggatatgtcatgtgctttgcacacttaggacttagttttattggagtcacagttgtgactaagggtggggacaagtcttttccatcaaaaaacattccaattcaattatggtgagtcttgatttttttttttaataaatctttgttgccaggctttttgtttacccctttaataacatgttcctcacatatagagaatattggagtgatacactgtattcttccttgacctaaaaggtctggatgtgggctaccttttctcccatcatagtcagtagttgtttctttatattgcattaatcactgggacaaagttagcacttcctcctctgccactcccgtataaattgcagtagaaattgctggggacgtgatattatgatcatgtgattttctttattagtctcaccggctacagcaacctgtgcttaccagtaaacctgctggcttgtaagggatggggttagaagtgagccgagtggacaccagcattatgtcaggagtacaggagccaatgtcttgccctttgctcttatttactaactgtgccatcttagaaatgccattgcatctatccttaaaccttagacttattatgaataaaataaaaggattaggtaatataatgtttgaattggtctacaaggtcaggaagttaattgttcctttgtgcctgttagcttaaaccttaatttgacataattaccagtctttctccatgacctttgttaataagatgccatgtgtggtgacatgtgtgaaagtaccttaaccttgtaggagttccatgcatcatatgtatctgtgatgtactgtggttaataaatacatttccatagtgatgctctccagggtctcttgaaacacaaacatcaagatttcttcaacatgggtgggcaacataatcattgctgtgctggaatcaataaagttttacaaagaaaacagtaaaagcgactagggagaatctgcatgtgcagtgactacctggggtgctagcatgggggactgaagagtaggaggactgtaactgagaccagcttggatacatagggcgccagacatgtacatggcatacacacacacagattcacacacacacacacacacacacacacacacatatatatatatatatatatatatatatatatatatatccaaaagactcatacaaatatactaaaatttaaaaactctatttatctgagtagtgtaaacacaaaaatccaaggtagaaagtaactgaggaagaaacctgctgtcagtcttctccacatgtgcattccctgcatgaatgagtacacacacacacagacacacacacacagacacacacacacacacagacatacacacagacatacacacacacagacacacacacagacacacacacacacagacacacacacacagacatatacacacacagacacacacacagacacacacacacacacacacatacatacacatactgtaattctgatctgaaatctaggttgaaaagtagtgacagatattagataatgttatatgtttttgtccttacaaagtttattttatgaacctgatatccaacatgaaagcagttgtggaggagccttttgagatcgggttagctgacaggaggctccaccatcatgcataagaatcagctaccttacaaagatgttcaaaagtgctattttgcctcccataagggaaaaaaaaagcatcaccaagaggcagagaaccagactccccagacactgcctatatcatggtcttatactttctaacctccagaactgatttatacatttctcttgtttatatcaagtttgactgggagacaaagatattttgttctagcatcttgaattagccaagtcagaagtcttttagttgttcagaattttatttttatatttgtggattgttggtaaagtacttgcctattttgtgtcttgggttcaacaacccaatatctaagtaagtaattaagtaagtaaataaataaatggataaatgttttgaaaaataagttgattggtcaataaataaataactagcatctagctgggaatattgctaaatatggggtgttcctatagttttctgcaggtttgaggactgctctgccacttctgtgatcttgtgcaaggattttaatctcttgacaccatattcctcgcctctaaagtaggctaatcctccaggttgctgtaagaataagtgagcgatgggctgccccttcttatggaatggttcacagggtaatcgtgttgagaaagctccagacttactgaaaagacaaaaatcaaacatgctttgagtgtccgtgatcacacagtcaagaagttcagagaccattttttatttgcttcatcatcagtgaaattcataatctccttttattctggccatctcattagatttactatgtaattgaaaatgttttatttaataaatttgttaaatggtgactattattatgtgggtttcaattgagtccttgaggcaatatttgctagaatgaaaatatcgggtaatttaaaagaattatcaggaagattaaaatattaatatatccctccattccaaatttatatcttcttaattataattatccatctttttaagttagctataattttaaataagttataccacatgttttataaaaatctctttaaaattttgatagggtagttttaggtcaataattttattattctcttaaaatttatgtgactggctgaaagtgataccagaaagatgattgtcaaccagttcagatgttctgtgcaggttgtgtaatttctcatggatatagtgcctagacaagtgttgatgtttgaattaaaatttctggccatggtgggaatgcctgtgtcctattacttgatagacttgggaaggagaactgataacaacatccaggctagcctgggatacatagtaaatgaggtcctgaccagcctgggctacaaagtgtgtgagttccaggtaagcctgggcttgttacaaactgagacttagttgaaaaatggaaaaaaaattaattaaactagtagaaatggtattgcagtggatggagtgattgattctctaaaatcataatttttgctctccatttagccatttctttcggtgacttattattgattctttgggttacttgatgcacttaaatcttattttgaggttttgtcatgaaaatattttcttaactgcaaagtgtcacatcagtgtcaccctgatcccacagtcacacacttacctgctttgttcattcattgagcatatcttcttctagagttttacatagaaaataaacaaaattaagataaaagaaatcctaacttgtaattttatctctgcatgtaaacacataaaatgacagggaaaaggttacatgtgctataacatgtaaaaacttttgggtaaattcctccgaaatatcaaagtttattttagatggattaacttaatgggtggttggatgatatattcaaacactgccttgagaacaccacatgtgggagacattgaagtgcaactaaagaaattttgctactgaagcctcaacgattcctctgttcagttacctaagttgtgtgggtatctacccatctcctatatcactaatggaatgtgaagtcttccttagaatcaggagacttttgtagcctgaaaaggccagtgtcagctactcaatttcacataatactagcaccttctctagttgacaggaatattttattcccacagcctttctggaagcttccagggcaatccctctagtcattcagcctcctgccttatacccttgcagctgtcagacctgacctgcttgctatttaagtgcttacatggcacgttcctatatcttccagcaagctagtgtgcccactctagtaagtgatagcgtcttctgatttcacagggggacagttttcttgagctatatgatgctccagcatgtctgctcagcccaacttcaccacctccacctcaagaaatacctccttgtcgaagtgtgttctcagtttcagcaaaaagcaaggttacatatttgccctgaacgtgtcggctcatccttcaaatgtttatgctttactgtgttttctgttagacttgttaaccagtggtgtaaacatgagcaaatgaaaggattagttctagaagagagagagagatcctgaaaggctgagtagtgaatgccaaagatgctcacacccaaatgtctggaagttgtggctgaagcttgtataacagaaggcacgtgtctactgttctgcaaggattctgaggcccagagatgatcctatagtgctttggtaggcttggtatagtgacagggatcatattaaaatggaggtaggaatcaattggaaacaagccagtgaaaacttaagcaaaggacagaaatctttgatgctggggacaaggcttcaaaacagacaactagaagacatagaaggggcgttctcccctttgagcctcttaagtgacagtattcctggtgagacctgaacaaatgtctacttacctaagagagggaaccaacaatggactaaagtaagaacattaccaaagttcaactcagtgtaacaatgagtgatgttggacttacagggatgtaggcacagaattactgataggagcagaaatgaatcaaattcaactgtatcatactgcacaagtggaagacagttcaccacattggagaatgttctttcgaggcaggtcattggtgttggcctgagcctcttcaggcagctcagcttgtctctgtcatatctagccagcttggtgaggttctcccttggctgattttcttccctcactgcttatatatactaggagagggagaaggctagtgaatctggccacttttatatacttcctgaaatcttttgagtttacttcctgaatgtaaagacctatcctgctggatggaattgttcagctttctttaaaacattctgtgtccgaaagaccttcaccactagaaaaccctcctgtttcaacaccgtccctgtaacatcctgtagacagagcttcctccaagagagaaggcgataatctcagagacatctgcttctggaacccccggcattaatcagatggaaggacagcttgagcttaggcccatgaaactgcaggtttctgaccggaacagtaagagaagagtaactgtggacttttaagtcattaaatttatgataattcatttcacaagcaatcagaacctaacaaagatcttctgaaatgtagattagtgagtacaggagtcaagaatcacacagtcttgctgactgtagtctaatgcactccacttccatcaaatggctaggaagccagtaatagaggtcatgacccttctgataaggttcaggttttatgtcaaggcttggaggggcagaaacttggaaatgttaggcaaggcctgcttctttatttgctttgaggtcttatttggttctctgaaagaatttttgttccccaccccttgcttttcctgcaatttcccccatcatttccaacttactttaattacactcttgattcagtgttgcttttttgtttggttggtttttggcttgcttgtttgattgattgttttagatacaataaagaaaataatctgaagttgagtttgactttattctttctggttcttgggtatgatttcgaaaggacaagacaggcacactttgctttgtatcaggaccctcaaaaataattctgagtggtttaatgttcagaaaagctctcttattgctgtactgttcaatagtattttgaatttttcagaggtgccataatggatcttggactagtaactcatagccctaatgtccagtgcctatgacaatccgatggcctctaagttgtgcttaggcatactgatgggtaaggacgggaatcactgtgttacttcttttctgaacaaaattcttgttcaaatctacctaatacaacctgcatgttgtcagcttcagaaaagacacagattgaagaattccaggagccctagggatgactcctgaggaacagaggaatcagataagcagaggaagcccaccttatcatttcgtaaaggactgatttgtttttgttttgacatttgcatctgtactggctagttttgtgtcaacttgatacagctggggttatcacagagaaaggagcttcagttgaggaaatgcctccatgagatccaactctaaggcattttctcaattagtgatcaagggggaaaggccccttgtgggtgggaccatctctgggctggtagtcttgggttctataagagagcaggctgagcaagccaggggaggcaagccagtaaagaacattcctccatggcctctgcatcagctcctgctttctgacctgcttgagttccagtcctgacttccttggtgatgaacagcagtatggaagtgtaagccgaataaacccttccctccccaacttgcttcttggtcatgatgtttgtgcaggaatagaaaccctgactaagacaaattggtaccaggagtggggtattcctgtgacaacctgaccatgttttggggaggtctgtggaaggactttggaactttgggcttgaagatccatttgttgttaagagctctgtcagatgttttgtaagagcttggaagataatgttgagaacagtgcagaagatggaggcctggcttgtgaaatttcagagggaaaattaaagactcttttcagggccattgctgttttgattgtgaagattctgtagttctggttagctggggctgaagaatcagctgtgattaacaagataccagaactactaaagcaaaaactttgcattactgggactattgatgctggttagctggagctaagaaattagcggtgattaagaagagaccagcatcattgaggtgacatcttctgggaagtgttttatgagagcacagtggctgcattccagatatagccaaagttgtaccttgtgctgtggttggacttggtaatgtgtaagggtcacccaggtggtactggttttgaaggcatgaaggagttgagcagagcagctgaggcttggcactgtgagaggccatggaaggccattggtgaaagtgcaggctcggttgcaattgatggcccaggactgaaggggtcatgcagtgttttggagatgccagtaccatgagatgaccaccaagagcagcagcagcagtggagtacaggcatctggagcctaaaggatgacgcgtgtgctacaaagggcatggctggagaagtgacccaagcccttggaggagcccagaagatcgtaagttggatcccagacattggacgattggagattgactttagcttttgattgtgactgtgccctgatattttccctcttgaaggaagaaactgttttagtggagcccacagttaagagacttttaattgtaaaaagactttggattttaaaagagatggatattttaaagagattgaaattttaagaatatgtaaagactgtgggacttttaaagttatttagatcttggggatgaataagaatgtaagggttgaggtttactagtgatgtgtttgtgtgtcaagttgacaaggggtcaattgtactggctagttttgtgtcaacttgatacagctggggttatcacagagaaaggagcttcagttgaggaaatgcctccatgagatccaactctaaggcattttctcaattagtgatcaagggggaaaggccccttgtgggtgggaccatctctgggctggtagtcttgggttctataagagagcaggctgagcaagccaggggaggcaagccagtaaagaacattcctccatggcctctgcatcagctcctgctttctgacctgcttgagttccagtcctgacttccttggtgatgaacagcagtatggaagtgtaagccgaataaacccttccctccccaacttgcttcttggtcatgatgtttgtgcaggaatagaaaccctgactaagacagcatctatgaccacttactaattacaaagaatacaagtgacatttcagggaacacagaatgttcaggagtttatttacggaggcatttgttatacaggttgattttcaaaagccctttatttggttttgttttgtgggtattcatatatgcttttaaggataagatgaatgtaaaatagttgatgttttaaaaacagtgcatgctacatttcaagaaacattgcctcttataatccatcaataatgaaaacagggagtatgtaccatagtgttcttataggcctttcataaaactacttattagaaatacaaattgtcctatgtaacctgtgctatgctgagattgcaaacattctgaaaagggtgtcagtctgttttgagcatatctttgactattgtaacttcctagatttgcctcacatttatagtgactcaaactgcatcatttagctgtaactgtaatgcagttatctcagtggacactagtgctgctgctaccatcatatgcctacatttgggatttaatagtttgcaaggtttttttttcttattcactagtcctaaatgcttaatgaataggctgtaaggctttaattttcagccaacccttagtttatcaccaaaatgtatcaagtgataaacacaaactgcgtttagactgttatgtttttataaagcagtttataaaaggtggcatctggcaaagaggcagatccataaaactcatgctggtggatgccgtgtcattcttctaccacgcactcagaaaagactaatattattttgacactcacacacatccccaccgtcaaatttctatttttatagtcagcttactccacatatccttaagctatacaaaacctttcagctaatgaaaaaagtgacatttctacatatttattgcaatgctgttttagagggtgactttgcctgataggatttttccaagaacaatgtcatgttggtgacagtggacattactgaagacattgcatgcttagtcaggaaaggtcaatatagaaggacaaaacaaaacagctttatgtggcacgattattcgctagtatttgcctgatatgatgccataaccctggtgagtagactcataagtcatcaaatatgagtaaattttttcatacatatgtccagccctgcaatccatcaactccacagtgaggactatatctaagaaaaatggtttcacttagccattaaagaatatataaaattgtttctaacatcttgagccataaaattcctaagctggaaatgactgagatgtccatccacactagtaggaatagttgtaggggacatgcatgagtgaacactttgcagtgttaaagccatgctatctattgcaccttcaggaatgttaagaacatccaagacagaatctcattggaaggggctggccttggaggagaaaccttaagtgatttcctacacatgaaattcaagaactggtcaacctaactaacaatgagaaaagtcaggatggtagctgcatacgtgtaatgcaagggatgtccttggggtacttggttcctcaagttacatttcatgttacattgtgaaccccctgtttggtttcatgccaatatagacattcaaaatgtataggaataaccttcttcatgtgttctatcacttagaaaacaactccaaaacagaatagctgaaaactaattattatcgttgttgctattgcatctaatgaagtcatgggtcaaggattgtgataagatgttgcataatgcaaagctggctccagttccagtgactccatgttgggtgacttaggtcaatgatgctgagctaatctgtctgcctccccgctccccagcttctctccccctcacattctcaatctgtctctggctgcacttcactgtttctctccccctctcattctcagtctgtctctggctgcacttcactctttggattccttgtaacacaacagctttatagagatcagacttattaccatacaacaatgtgggttttaaatagtttgttaagacagtaaatacaaaatcatgaatttcttacaacgtgggcacattgaggactacatgacatcttttaagggatttgttctatcattcacaaggaccgattggaagagcagtgcattcatgaaaatctgcattatgcaacacatcagcactcatgattgggttcactgtgctcaaggagaggagacacaaacccacatatacatttctcagggccaagaattggaccagttttgttcagccatatcaggcatgttgtagctcagggaaaatggtggtctcctttttctcaaaacattcttttctattggagactatctggaatgttgagtaaggctgcaacaaacagcagcagttaaaggaaacctcatttgaaatcacactcttcagaatgcacctcatactttgccggtttcttttgagtttgaaagtcctgtgactttttctcatttcatttgatgtttctcagctttgagttttatcttgtgatagcttggacttctatttaatcatttaacgcccagagttaactgtcagattgaagccaaatcaggattctgatactgtggaaactcttggcgtctttcaattcacgggtaatgaatttgccctctgtagtcaaagtataatgttttcaaaaagaaactgtatttcttattaatcaactattagaaatcttttcctgttcggcctcattgtgaaggttcttagcaagagacaagagtaacacagccatgtttatgcagcagaacgaataggaaatctgctagaaatgtttattcaagctaactaaagccagagtgagcacacagccttttaaactctccagctttatccgaacatgacactgatgctgacagcttcagaaagcagtgtgtgcacacaaaaagctgcatgatcaaacaaatcaaaaaggtttcaaccctagtgttggagacatctttagcatggataattactgcacccttgcctggcatcatttggactcagagcagttctttaaacaagattgtacgtctcattggaagaagtctgttaggtcacatctcaattttgtgccagtaacttcaaagttcattttacagagtcaagttggggaagagctaaactcgatagctcagattttctctttaattaatttgcaaaatgccatcgttttgctgcccgtaggacatcaggaagggtgtaggcagtcattccttgtcacggtgttttcaaggccctactttcatttgtcacttggtgagctttgagatgtgtaaagccatcaggcagcaccacagcactatcactttgtcaaaggagagttgtttgcaccttactcgatgacaacctactggtgtcatcaggcccctagtgctggggcctgagctaaatatagcacatgcagtggaaggggtaggctatggaatctcatagggagctcttggtgctcctctgcctgctctctctcctcctctcaagcctcgacctcagcccatgttcttctgtacaagcaactttaaaaaggacattcctgtaatttagatgtgtgaatgcttcaggaactacttgattttaaggaaacaggctttaacaacaattctaataaacatgtgtgctggcacccatgtctgcacaagcatttatcccataggaaattactagtgtatgtgtatgtgcatgtgcgtgtgcgtgtgtgtgtatgtatgtgtgtgtgtgtatctttttctgtatgtatatgtgactaactttgtgtgtgaactattgacaatgccaggaacaagtcccttaagaactgaatcctaatctatatacctccagcctcaaagcacatgaccttgaggaatataaactgattttgattctctttggtaaattggggaaatcataccaacttgtcctaagtgacctctactctgggtctcatatgtattttgccatgaatataaaaaaattacaatattcttattatttgttataattagcaaattgtctgacaatgagttggactgaaactgtagaaattataattttttaagcatttttaagctgtttatatgctcaaggtgcttatgtgtttatctgggtgtgaatccatccattcacccatctattctgatatcatacacctgttgttcagaagcagccaggccctgtctcgggggccatgtgctcctcctatgggaggagaggcccttggttctatgaaggttctatgccccagtatatgggaatgccaggaccaggaagcaggagtgggtgagttggggaacaggggggaaggggaggggatgggggcttttggaggggaaactaggaaaggggtaacatttggaatgtaaatcaagaaaatatcaaaaaaattttaaaaaggattattttactgtgtgatctcaggaaaaatcgtgattttgtccttgggacttgatttccatcattgtacaaatgttggggttgggcccattgctttgtgtgtgtgtatgtgtgtgtgcttttgatctatagttgtgtgtacacagtgaggtcagaggctgacatagggtctctgtgtgtgtgtgtgtctgtctccatctctccttttctccctctctcccaccccctctctctagcactctaccttatttttgccacagcttccagccttttgcatgggtgtcaatgatccaaattcaactctccatgctttcacagcaagtattttacactctgagtcagaatcatttccctgacacccaccacccaccccccgagcccaccccagttgctttaaaatgtctctcagtttgagtaatctgagatgccttaccatttttcaaaaggctacatttattggttattctgtgtgctgtttctctgaggaggcctagaggagtaggtacaatagtgtctcacaaaccacagccacgcataatagaagcttacagctcagactggctttgacaacaggagtgagcaattatgtgaggctcaacatgtcccattgcttaaaacacacagaacaccactgtaagcttccttctaaacatgcagcttggtatcatacagctgaaacgtaacgaacttagttcatttccttatacacagtcaatgtattaagctgtcttaattggtgaaaaggataatagtaactctgcagtggagaagtcctgagcaaatagttgcttacagctttcctgtatgataaggagaacacaccatgaccaagagagtcttagatgaagagtacatacagtgagtctgtgaatctcatctcaaacacatctcagaagataagcaaggcagcatccagctgtaatcttagcaccagggaggctgaggcatagtttcaaagccagcctggactagagtgagacctatctccaaaagcaaaacaggacttgagagctggcgccatggcttgagggccatacctgactctctgagtccactctctaggatatatatcacagaaaatcaattcttacaagttgccttctgtcctccaccaaggcaatgtatgttcctctcataacttaatcaggaaatgtgataaagaattaaaaagaagaccatctgcatgctcagttaaatccttgtggcagtgcatgtctgcaatcccagcacgtggcaggtagtgcttaggtaggggatgccaggagaatcagagctcaagatcagccttggctacacaggggtttcaaagacagtgcagactacaggagacactatcttacaaataatctatggtttattaatgatgctccaaactgcccacaaacatcacctgtctcttcagcaatgaggaattccaggatagactgcatgaatccaaaagcttatcaaaaaaaatcaatcagtatcatgagtcaaatttggcttaaacacattatacataaaatgtgacttattccttgttgatgctctgatgttaccttgaaagagaaagaaacagttctcatataaggaaacaaacaaaaacgacacaacaagccagtcacatgaaaaaataagaagaaactggaaaagtcctcaagtacctcagagaagctctaaagaaaagtaattcaattttaaaatttatgggagggaaataggttgcttttaagaaaaagtcaatgggaaaatgttaaggttaaaggagggtaaagagacatgaagactaatgaagactgaattagatactagatttttattgtggcaagggatgacataggggtgtcattagagtggcaaaattgagaagcaaagtgacagagaggataagctattgtaactgtgtcagatttagtaaagttgtaactgtgcaacggagataagagagaaaaatatccctgttcttgagaaatatgccctggggcaacttatttttctctggggcaagtgaaagatggcaacaatgagataaagttgaaatgaggggcttgcaggtgagcagaagagcaaagatcagaggtgataactccagccaagcagggttttagtagttagggcatgtggatatgtttgaaattaatttcaagataaaagtctaaatagtgagtccttcattttctttctcctctctggtcagtgtctagttgtcttcccagaccctgggagtacttgtgcctcagtggttttgtttctttccaccactgggctacagtcttcagtgttgtcttgtttctctaatgactatgagcagcctcagccattgccctgggcctcttgcctctgccccttcaccttttagtcttttcctccactgtcaatcctgtccctgggccaaggcctaagctatgctattgctggctctgttgcttgttctacccgggccataggcttgacttgacctccatctagtcctgtcttgcatcttgtccatttagctaaacctcacactgagatctaggtgagaatgctatatgttttggtattgaacatcctaaaaccatttgtgaatgctcgagctctgcctaagtggtgaatttagagctagtgtcctcaatgattattaattatccaatgaggacttgtcgttgttcttcagggattgtcattctctcagtaagtatgaaaccagttggaagtgcatgtgagtaagtacattaaaaactgaccatcaccttcgagtgattcaatgtggtggaaacccaggagatcaaatgactatcatgacagcaaaaatggatgaaaatgactgtgggagtttgagaaacatatctcccaaagagctctgatgtaataatagagtgtgggctctcaagtgatggtggtaaggttagactgctcttataagcttagggtcagttcagtacataaagaagtgggtctcagactgggttgtcatacagaatccagttgagacttcggctgtgtttctaagagaaggtgacttatggggtacccccatggaattggggaaggtctgctttgtatcaccagtcttgtgttttaaacataaaaaggaaatttttgttgtcttagagttataatgagtctacattttatcttttaagattcaatgcctcttgtgttgtaatagattgtttttggatcactggtataggactgtaaaaggaaatgaactaagagcctcaaaataggaaacagagacgtttcttgggcatccagagcagaggttctcaatccgtgggttataatacctttgatattgttagatatcctctatatcagatatttgcatcacaaatcataacagagcataattacaaatttggagtagcattgaaaataatgttctgattgggggtcaccacacatgaggaactgtattaaaggttgcaacattaggaaggttggagccactgctctagagactctctctcccccagtaagtagcatgttatctgaaaatgaatatatctgggtcagtgtattttttcctcctctctaacacttccgtgacccaaagatgaatgatctgtaaccttccactgaaagcaaagttggtatttaggttaccggtaattaattgctaccacttccctgacaaagcataatttaagtgtagagtagtcacttagaaaggaaacaactgtcaattaccatctaatgaatcctgtttaccagaggtgatgatggattggcttccagcagctcggctggagcacaaccttctgtgcacagggagtcttacagaatgtctgtgatggctgtgggatttgtgaaatatttactctcagggccaggatttacagaagtctcagatgtcagttacagtctagaattctgcaactgttctcagagtggctgagataattcctctcagttgactacttgcgtatgagtaggtaaccattgctaatatgatatgtttaagtagggtatttgtggtgacgaattatcaagacaatcatagatagctcttataagatggatgttaactaccggatcatatctaatacagctcctgtgttgaacatttcatgggtatcatctaagttctcaaaacaatcccatttgaaagccatttgcaaaaagacaaattctgggtgctgtgcaaatgtgctacggatgagtgtcaagatttgttgcagttcattagttgaaggagaacctggtgcaaaattaaaatcagcccaaagagaatttgacaggcatgtatgcatgtgcaatttgatagatgcttgcattgatagaatatccctttggcctgtaacatcccatgtagaacattctcattgctcagttgtaaaataagcccttagacaaaaagtcaagccctgtaagatgaagaaatttgacagtataggaagacagcaagcttaattgcctgttttcaaatgttagatgtcttcaaaaatatttttatattcttttcagactataattataaaatttccctctttcctccctgcaatcatcccgattcaaattcatggcctctttttcatatatacatatatatagatacatatatatatatgtatctatatatatatatatatatatataaatttatatgtataaaacatataaatgtataataaaatgtattatatattatattatatatttatatataataaaatatattattaatacaaaatttattacatgtttataaatatatattcatgatctctacatattcataaatatataaatacaattttctcagtccatagacttggatctatcagttttcagggatgctcatttggtattgtccaatcaattgctctattctcgcctttggacgactgtttctcccacaggtgacttttgtgtaagtagacctgtattccacatgctacacatgaagaggttgatgcttcataagactgagttctcagaggtgatttgataacaataggagctgttatagactgatatccaatgactacacatatggaacagagatgctggtctcaaaacctgtgggcaagacgttcactgagctttttgtggttttccaaatttggaaagtggtgtggctaatagtccttcaaaatgacattgtcaggatttactgagatgagacattaagccgagtgcatgtgagttcatcttgtaatggccactcagtaaattctggctcctgttcatattagcaataatcacctcagtacaacaactccctgcatattctgaggtcacatgggtctaaaatagtgctttcctgctaggcgtggttgccttgcgagtcattcctgtagcactgaaaattaattttaatgttaagtaagctatgtggccgtcctatctcagtcttcctggggcagatgagctgatacaggcatcggtaggaatcttgtcttttggaaggaaagggtgctgaaaattaaaactctgtgttgagatagcgaagtagcatgtggttggcgaatttccctactgttgacattagacttccctgttgatggtgagaaagtatgaatttttaggacagctgtttttctggaagcacaggtttgttctgccttcctagctatgaggtcagcacgtgtgcatctgattgcatagttgcaccactacttttctttcatgttcttatcctcgttgtttggaaaataatgaagcattcatgcaagaatagggcatgctgcactgatatgcaagtcttgaggaacccatgaaaatgacaaaatctgtgaccactagatttctgttagactttcatctaattaaaaaggaagctcagactgtctcactctgatcatgatgctgggaaaacaaacccctttgtcacaccatacaaataccatgtctacactctatgagatccagcaagcagtgagcatctttgtaaacacaccaagtgtgcttgacatcattatttcatactttccttaaatttgtaagatcctataatgagtttatgttctgtgttatatttagaatttttgccttataaactctcctaccatactgaaagcagtacccaggaagcccttttttgttttgggtgcattttgtgagggaatgttctagggcctcatcagcaggttcaggggttgtccttgaggaaatgaggtggactgtgaaccataagcaagagcagttaagggtcttctccatgaagaggcatgatgggactcagtgatacccacacaacttgttcaaacatgtctcccatatctgttttttgctttctaccatgcatgcaaaggttaggtgctgggcttggtattttgactcaaatctttctttcacatatgctcgactctctcccagcaaaaacgatttctattttactcttcatttcctcaagcaaaatggatcctgagttgcagagttgccagcggaatattgtggaatatactgacttaaggaagatatattttctcatttgagcttcctgtggaatttggtggatgtaaatactctctgttgagtctgccagactctgtgtactctagttctagtcaaagtcagaccaagtcaaggaaggaaggaatgggggttggtaaactattctctatttctgcctgtgctgtctcacgatggcaatacagcttgcttaaacttgtacatccatagctctcatgaagatattcatggcattaaatataggctatctagaaaaagtggtagaattacattttgactatggagtcattatctaacagaatttgtgttcttaaaaattaggactttaaaattagctattctgacctttatataaacatttaaaaataaggcagtacgtaagcaatgcactctcattaaacttaataaagttcaataaaaattttaaatttaaaagctatcttcataaaacagtgtgttaacactaaggcattaaatagtgcattagagtttaaaattattaaaagttactaagttgtcatttagaatgagatttattttatgatttcagacacctccaaaacaaatcgacagtcaattgaaatgcattctgagatgtaaaagcaccattaattactgttaatggctcttctctaatgtatataaatatatcattgctagcaaactcctggcagttatttcttaattctttctagacagcttaaagattctaatttattaatattcataataagcaggaaaaatcaacatgttttgataaatggcgatggaagatgcactgtgcttgagcagaaagtagctatctgcttgttggcagtagttcatggttctctatgaagcagaatctgcaacagagactgagagtttaaagtggtgtgtgtgtgtgtgtgtgtgtgtgtgtgtgtgtgtccctgaaagaacttttcccttattcctatctcccatctcttcccagagtgtccaactcagcagattctcctgcagtggaatcatgccttttgattaactttactgaaaccaattgacaaggagcacattggggaaacagtgttttctgtttattatgttgtttgatctctacttgttgggagccgcgcccacattcgccgttacaagatggcgctgacagctgtgttctaagtggtaaacaaataatctgcgcatgtgccaagggtatcttatgactacttgtgctctgccttccccgtgacgtcaactcggccgatgggctgcagccaatcagggagtgacacgtccgaggcgaaggagaatgctccttaagagggacggggtttcgttttctctctctcttgcttcttgctctcttgcttcttacactcgggctcctgaagatgtaagaaataaagctttgctgcagaagattctggtctgtggtgttcttcctggccggtcgtgagaacgcgtctaataacaattggtgccgaattccgggacgagaaaaaactcgggactggcgcaaggaagatccctcattccagaaccagaactgcgggtcgcggttatgaagtgttcccacaacacagactgttaagaaggattcaactgtatgaattcagaacttttcagctggggaacgagagtaccagtgagtacagctttacgaggtaagtctgatcttgaactttctaaggaaattcaagacagtctatcagaagtaaagtggaaaatggctttgcaaggtatatttggccttgaattttttctagtgttagaagcccttttgttccttttcacatgttatcaagtggttaagatagggcggattctagatgaaattcaggacaagctatcagaagtaaagtggggagagagagtaggagcaaagaggaaatatggtacacaaaataagtatacaggcctttccaagggtcttgaacccgaggaaaagttaaggttaggtaggaatacctggagagagattagaagaaaaagaggaaaaagggaaaagaagaaagatcaattagcggaggtctctaggaaaaggagcctgtgctcatcgctggatgggctcggggagccagctcttagtagctctgaagcaggtgaagaatcctcctctgaggaaacagactgggaggaagaagcagcccattaccagccagctaattggtcaagaaaaaagccaaaagcggctggcgaaggccagtttgctgattggcctcagggcagtcggcttcaaggtccgccctatgcggagtccccgccctgcgtagtgcgtcagcaatgcgcagagaggcagtgcgcagagaggcagtgcgcagactcattcattcccagagaggaacaaaggaaaatacaacaggcatttccggtctttgaaggagccgagggtgggcgtgtccacgctccggtagaatacttacaaattaaagaaattgccgagtcggttcgtaaatacggaaccaatgctaattttaccttggtgcagttagacaggctcgctggcatggcactaactcctgctgactggcaaacggttgtaaaagccgctctccctagtatgggcaaatatatggaatggagagcgctttggcacgaagctgcacaagcgcaggcccgagcaaacgcagctgctttgactccagagcagagagattggacttttgacttgttaacgggtcagggagcttattctgctgatcagacaaactaccattggggagcttatgcccagatttcttccacggctattagggcctggaaggcgctctctcgagcaggtgaaaccactggtcaattaacaaaagttgtccagggacctcaggaatccttctcagattttgtggccagaatgacagaggcagcagagcgtatttttggagagtcagagcaagctgcgcctctgatagaacagctaatctatgagcaagccacaaaggagtgccgagcggccatagccccaagaaagaacaaaggcttacaagactggctcagggtctgtcgagagcttgggggacctctcagcaatgcaggtttagcggctgccatccttcaatcccaaaaccgctccatgggcagaaataatcagaggacatgttttaactgcggaaagcctgggcattttaagaaagattgcagagctccagataaacagggagggactctcactctttgctctaagtgtggcaagggttatcatagagctgaccagtgtcgctctgtgagggatataaagggcagaattcttcccccacctgatagtcaatcaactgatgtgccaaaaaacgggtcatcgggccctcggtcccagggccctcaaagatatgggaaccggtttgtcaggacccaggaagcagtcagagaggcgacccaggaagacccacaagggtggacctgcgtgccgcctccgacttcctattaatgcctcaaatgagtattcagccggtgccagtggagcctataccatccttgcccccgggaaccatgggccttattctcggccggggttcactcaccttgcagggcttagtagtccaccctggagttatggattgtcaacattcccctgaaatacaggtcctgtgctcaagccctaagggcgttttttctattagtaaaggagataggatagctcagctgctgctcctccctgataataccagggaaaaatctgcaggacctgagataaagaaaatgggctcctcaggaaatgattctgcctatttggttgtatctttaaatgatagacctaagctccgccttaagattaatggaaaagagtttgaaggcatccttgataccggagcagataaaagtataatctctacacattggtggcccaaagcatggcccaccacagagtcatctcattcattacagggcctaggatatcaatcatgtcccactataagctccattgccttgacgtgggaatcctctgaaggacagcaagggaaattcataccttatgtgctcccactcccggttaacctctggggaagggatattatgcagcatttgggccttattttgtccaatgaaaacgccccatcgggagggtattcagctaaagcaaaaaatatcatggcaaagatgggttataaagaaggaaaagggttaggacatcaagaacagggaaggatagagcccatctcacctaatggaaaccaagacagacagggtctgggttttccataacggccattggggcagcacgacccataccatggaaaacaggggacccagtgtgggttcctcaatggcacctatcctctgaaaaactagaagctgtgattcaactggtagaggaacaattaaaattaggccatattgaaccctctacctcaccttggaatactccaatttttgtaattaagaaaaagtcaggaaagtggagactgctccatgacctcagagccattaatgagcaaatgaacttatttggcccagtacagaggggtctccctgtactttccgccttaccacgtggctggaatttaattattatagatattaaagattgtttcttttctatacctttgtgtccaagggataggcccagatttgcctttaccatcccctctattaatcacatggaacctgataagaggtatcaatggaaggtcttaccacagggaatgtccaatagtcctactatgtgtcaactttatgtacaagaagctcttttgccagtgagggaacaattcccctctttaattttgctcctttacatggatgacatcctcctgtgccataaagaccttaccatgctacaaaaggcatatccttttctacttaaaactttaagtcagtggggtttacagatagccacagaaaaggtccaaatttctgatacaggacaattcttgggctctgtggtgtccccagataagattgtgccccaaaaggtagagataagaagagatcacctccataccttaaatgattttcaaaagctgttgggagatattaattggctcagaccttttttaaagattccttccgctgagttaaggcctttgtttagtattttagaaggagatcctcatatctcctcccctaggactcttactctagctgctaaccaggccttacaaaaagtggaaaaggccttacagaatgcacaattacaacgtattgaggattcgcagcctttcagtttgtgtgtctttaagacagcacaattgccaactgcagttttgtggcagaatgggccattgttatggatccatccaaatgtatccccagctaaaataatagattggtatcctgatgcaattgcacagcttgcccttaaaggcctaaaagcagcaatcacccactttgggcaaagtccatatcttttaattgtaccttataccgctgcacaggttcaaaccttggcagccgcatctaatgattgggcagttttagttacctccttttcaggaaaaatagataaccattatccaaaacatccaatcttacagtttgcccaaaatcaatctgttgtttttccacaaataacagtaagaaacccacttaaaaatgggattgtggtatatactgatggatcaaaaactggcataggtgcctatgtggctaatggtaaagtggtatccaaacaatataatgaaaattcacctcaagtggtagaatgtttagtggtcttagaagttttaaaaacctttttagaaccccttaatattgtgtcagattcctgttatgtggttaatgcagtaaatcttttagaagtggctggagtgattaagccttccagtagagttgccaatatttttcagcagatacaattagttttgttatctagaagatctcctgtttatattactcatgttagagcccattcaggcctacctggccccatggctctgggaaatgatttggcagataaggccactaaagtggtggctgctgccctatcatccccggtagaggctgcaagaaattttcataacaattttcatgtgacggctgaaacattacgcagtcgtttctccttgacaagaaaagaagcccgtgacattgttactcaatgtcaaagctgctgtgagttcttgccagttcctcatgtgggaattaacccacgcggtattcgacctctacaggtctggcaaatggatgttacacatgtttcttcctttggaaaacttcaatatctccatgtgtccattgacacatgttctggcatcatgtttgcctctccgttaaccggagaaaaagcctcacatgtgattcaacattgtcttgaggcatggagtgcttgggggaaacccagactccttaagactgataatggaccagcttatacgtctcaaaaatttcagcagttctgccgtcagatggacgtaacccacctgactggacttccatacaaccctcaaggacagggtattgttgagcgtgcgcatcgcaccctcaaaacctatcttataaaacagaagaggggaacttttgaggagactgtaccccgagcaccaagagtgtcggtgtctttggcactctttacactcaattttttaaatattgatgctcatggccatactgcggctgaacgtcattgttcagagccagataggcccaatgagatggttaaatggaaaaatgtccttgataataaatggtatggcccggatcctatcttgataagatccaggggagctgtctgtgttttcccacagaatgaagacaacccattttgggtaccagaaagactcacccgaaaaatccagactgaccaagggaatactgatgtccctcgtcttggtgatgtccagggcatcaataataaagagagagcagcgttgggggataatgtcgacatttccactcccaatgacggtgatgtataatgctcaagtatcctcctgttttttttaccactaactgggaactgggtttagccttgattcagacagccttggctctgtctggacaggtccagacaactgacaccattaacactttgtcagcctcagtgactacagtcatagatgaacaggcctcagctaatgtcaagatacagagaggtctcatgctggttaatcaactcatagatcttgtccagatacaactagatgtattatgacaaatagctcagctgagatgtgaacaaaagtttccgggattgtgtgttatttccattcagtatgttaaatttactagggcagctaatttgtcaaaaagtctttttcagtatatgttacagaattggatggctgaatttgaacagatccttcgggaattgagacttcaggtcaactccacgcgcttggacctgtccctgaccaaaggattacccaattggatctcctcagcattttccttctttaaaaaatgggtgggattaatattatttggagatacactttgctgtggattagtgttgcttctttgattggtctgtaagcttaaggcccaaactaggagagacaaggtggttattgcccaggcgcttgcaggactagaacatggagcttcccctgatatatctatgcttaggcaataggtcgctggccactcagctcttatatcccatgaggctagtctcattgcacgggatagagtgagtgtgcttcagcagcccgagagagttgcacggctaagcactgcaatggaaaggctctgcggcatatatgagcctattctagggagacatgtcatctttcatgaaggttcagtgtcctagttcccttcccccaggcaaaacgacacgggagcaggtcagggttgctctgggtaaaagcctgtgagcctaagagctaatcctgtacatggctcctttacctacacactggggatttgacctctatctccactctcattaatatgggtggcctatttgctcttattaaaaggatagggggagatgttgggagccgcgcccacattcgccgttacaagatggcgctgacagctgtgttctaagtggtaaacaaataatctgcgcatgtgccaagggtatcttatgactacttgtgctctgccttccccgtgacgtcaactcggccgatgggctgcagccaatcagggagtgacacgtctgaggcgaaggagaatgctccttaagagggacggggtttcgttttctctctctcttgcttcttgctctcttgcttcttacactcgggctcctgaagatgtaagaaataaagctttgctgcagaagattctggtctgtggtgttcttcctggccggtcgtgagaacgcgtctaataacatctactggcgagggatagtcatgctgctgtttaacaagctctgtgttataatcatgataaaagaatattgccttcttgtagacctaaccctaaattccagtgaatcaagtggcttagagactcccaggtaggatttacactgatttagacagaaaatgtgacagctggcagaattgatgtgtccacatctgaatccttcataactgcttcaggatgcctagtagaagaagaaaaagagaaaaaaagaaaaaaaaaagaagaagccaatttttgtcctataatgtttttatgattttaggttttatggaagacttcattgacaattttttcctcttttagttatggagatgtgtaattcaactacagtctgattggctgttgggttaaagatgctaaatgtcaataagagattaaaatatagtttctaatgcagagttcccagattcagcaaattaattctttaaaactcagtgcagctaaaatttaattttagagctgctgaaagagtgtgtccccatgtagccattgatatgtatttattaattgcttttgcattactatgacacaatacctgatagagcaacttaagtggtggaggatttattttgcctaacgatttaagaggccagcaatcatggaagcattatcatgtaatatagactgtaggagagtttcaaagctggaaggtgagaggctatctgcaattatcagggcccactccttaggaatctacttcctcttgcaaggctccaccttcttaaatttccataacctcccaaaatagtgtcatcagactggggtcagatatgagccctgtggagaacatttcacatccaaattataatattgtaccttggtcctcatagagtcatatgtgaaatgcattcagtgaaactttaaaggtcaccatagtcttcacagtccccatattattcagaagttcagtgtaccatctgagttcaaggcaagctcttagctataacctttaaaagattttgaaagaagaaaaaaaaatacgtagttccaatggtacagaacaactattcccattttctgggctcatagcaaggaaaaatagaaccaaagagagatcaaaacccaattcctgtacttcaggtttgcatctaggacatatggtagcatgactggaggcactgtgcccttggataaccttgctctaactgcccttaacttgtcaatacatagaacttttctcttggtctggctctgtttggtgcctctagctttcctggattcatgttttccaagttcctagcatctccaaaccatactgctagttagagttcatcttcagggcttcccaaattggcctcttagagtatctctgcaaatcttcccctgattcttagtagccttacttgtgattctctgaaaccttaacacaactctcagtgtttctgtcagtcctggatcccatatccttgaagcatcatcatcttatgcacaatgatctactagcatgttgagatatagctgaaccctcactcccttggaccttggctgccataatctccgagtgctcatatgactgatgcatgaaaacactgtctgcatcagccatattgcagcaaggaaccctcaggattccagcattaggccattttcttttcaaagaatgtgtgatttttatgccttcggtaagtaaagccttaccctgagcagcatcttacctaatgttctaatgaaaagtacaaggcttctttgtggaaacagtaatccctttaacaacatagttcatgtgttcccaccgggctcatctgcagcttcaactgtgccccctcatttttttcatcagtaagatgtatacttacacatcctagttctttgctttctactcataattcttattcttaatatggctaaagaacatgaagcttaatatggtagagaacagctctaccacaacttccatgctatgctgtcttaaagtttctgcttccaaacgaattattccattacttttggaattctgacagaacataaccagatacttgcccagaatataaaataaatggtttatagcccaatttgcaatagagttcattttctccctaagatccctcatgatctgacctccatgtttcacctttctatcaacaccctggcctcgcagacttctaccagaatggcttattagtctctgcttgccacatgtaccatgccattgtttctctagcctatagtcccaacctctttcctattcctcctaaaaaccagttctgtggtcagatttatcacagaaatattctcaccctggttggaatttgcttgaatagttgtttttcccatttttctgataacatccctctcaacagcagcttgtaagacaaagggtttatcaggggtctgtttaagatattacagcccatcattgtgaggaaagcgtggtagagttcacggggtaggaacacgtggtacagcttgttatatcttagctgatgggaaaggaaaatgcagggagggaaacagacagagacagcaagattgagtgccgcagagaggggttagacagacagacagacagagacacagaaagagctcttaggctggtagcctcaaccttctctctcccaataacctatagctaagccccatctccaaaaggttccataatctccccacataacaattcagtccatattcatttctgtttctgtgataaaataccttgtcaaaaagcaacttaagagataaagattatatttggcttacaactccaagctatagcctatcattttcagggaattaaggcaaaaactacaggcagctagttgacagcatattcaagagcagggagaaaacataaatgcatgcatgcctagtgcttggctattttttgctacttttatacaacttggagcctgcaatacgaggatgttgctgtttactttaggctgggtcctgtcacattcattaagcaatcaagaaaattccttacagacatgtatgtgcacaggccaacctgacctagacaagtcctcactgagactgtctttccaagtgattcaatgttgtgtcaagccaaaaactaaaatgagtgatctcacacccttcacaagagtttatgcacagtgaacctgtgttgtatactttacatttaaaccatgtaacttgtaacaccacataaaatttgtgtttaaagtgttttcatgttctgcagtttaaaagctattagtaggttttatctgaaaaatctatttgaattattatggtgaagaaactatgcaaatatatgttgtatataaaatgagagaaaaaccaaccatctccaaggttaatgggaggtttaaatgtattgatttaagcaatgcttgtgtagttcctagtctcttgtaagcactatggatgtgcaaacatttatccctatgggtcatttgttgcaattttattttctaccagaatattttgggcagagatctgtcaaaagtaaaggaatgtaggtggttgaggtaatggcaagtctaggttcagttggaattaccaaaatctagactgacttggagttagaaactcctaataattttaagtgctggtatgttatcagtatttgaaagcagccaccaaaagtggcttttgcctttcagtcttcagaaagatacttattgtatgtaccattgttatgctgggcatgccttgaatatttatatgcttgagagcataaatgataaaagagacaatcaggaaccaatattcaagtcacaatcggtattcaggacattgtgtgaggtcatggggatcccattgtaccaagtggaaacttattgtgttgtggattgatttaaatggaagaacagccagtattcctggctgtatagctacaagcctcttaagaactgccaagtataggtttcccctgtatgcagttcctcctctaggatctgtgtctaggagtcagaataagttgagttaccaagcaataacacaaatgcaaatctcagtagtttcattaagtttatttattgctcatctttgccagtcctagagtgattctaggagactccccaggactttacccctctgaagaatggcatatttttgttcaatgatgccttttagaatgtttatctaaagcttttcagctcaattacaatctgcagaaccagacatagatagttacacacatggtccaaaaagaaaacaaatcacacatcaaagccagcccagaaatacccaactggaaagtaggttttaaaacattgctattcatgtgcccagcagtgagagaggaccaaagcaagttgtgagcatgtctcaccacagagcagtttctggtagacagtattcatctccattacagagttcagaagcagtttcaggttggcttttctttagatgtcagactgtcaaatcttgggatggtttgtccaccatcacatccctctaattagccatgaaaatgcctcttgcaggaggaattggaatatgatttaggaatgtgctagaataatttcttctgctgtactctctcatagacacatacacatgcacagaggtcttgtgcacatgtatgcacacatacacgcatgaatgcatatgtacatgcatgcatacatgtacatacatgcattagcataattatacacataaacacacagtgcacatacacatatatgtacaaacacaggcacacgctattaatacctataatatgcatgtatgttaatttctacttggaacctcttgatcctttttttaaaaagcaattaaaatatatgtgaaacatattagtgtgacattggctcataactgctttatacacatatggccaaggcaagatgttaatcctcgtagccaacatcttttctctgtgataagattcttacttatagttattaattggtaaggttacagttcatattcaatggttttaaaaaaccacagatgtaatatatgagtatgttttactgtttagaaattctagggaatgcagaagcataaaaaataatctgcaccttgtcctctaacaagtggcaaaagctagcgttgattgctttgattacattgattgcttcttctagtgtgtgtttgtctccatgtacaaccctgcccaaggagatctatgggatacctcaagaagaattagagaagagccagaaactttgggaaggcagacagagcagtgagctacttttgacagatataggtcagattttatctgtttctggagtagacttctgggtatacaagttgaacacatggggttgagtttgtaattgaagagtcaggctcagtggataaccatgtgtagttagatccaacctgtctggttggagatgtattgtgcagacttgtagttagtcttggtaattccagttgtacatcactctcttagtaaaacatacctaatctctgctgcatttacagttttgatttttctttttcctctagtttaacagtatctttcaccatacagatatttttctattttaaaatgttggtgtttatttggtggttgtaagccttttgaagatgttcataataatgttttaaataagattttttttaaagaaatcatttaaggggaatcattttggctttttgaatgaatgagtgatagtgttaatttacatagctgtggatgaaagactcaagagaatattttaaaggaggaagcaattccttttagacaattgagaccatggtcacttggctccaggtacaggacagaattatgatattggcagcatgtggtggaggagtccaattttgccctggtatacagaaaacagaggagagcgtgggatgggcatgccttcagtgacccacttcttccatgtagattcagtctcccaaaggttcaattatctccccaaataacacactaagtagggatcaaccatgtccataaattcccataagaaacatttgattgtcaaggatactcctccatacaagaagcacaaaggcatctaaggaatccaaagagaatatagaataagtttagaagataagaattaggctcccgggagatgatctgactgctctgtagtcaggagcttgaaatcaggaacatttgcaaagtgactgatgatagaatagacaggacaaaggactacactgaatatagggctcatggaatagagtaaacattttggagacaactccagaagtctatcaatagggttgatatgtaggagcagatgggcgttcaaatccttctatagctgtagtttgtacaagtagacccatagtttctgagtcaatggagaaaatcatggtaaattaggaaagactgggctctgttggaggaggcaggtagataggagttcatcttctgatgaaacacctgccttttatttttgcttgtatgaggaactgacaaaacatcatcccatctgttactgctacaccctaactgtgcagagggatctaagaatcctccatacgacaaaagagaaaaccaaggagaaatgttttgaaacttatggctgcaacattaagtggcaatcttcccatgagcctttagaccctgccctgtgcatgttctatgttgctgtttgcccctcactaaaactgatttacttgtgcaattgtttctttaggaacaacctttgattgtgctcatttaatgatgcattcaagcttgtaggtatttagaaaccaaaagtgtggaataatgaaattaaatccacactgcggccaagctctggtaccagctttcctctgaccttggtcccattcttcaaacctcttgaagcctggtcttctctggagaggtcagaatgattcatctggtgaggcttttccagctgtaaaatttgatgacttcatatttcaatgtgtcagatgcatttcggcatctctaaagtacacttggtcatggaagatcagctctgctatttatcttatttagtcaaatatgttttgcatgggctgttttaatgcataaaactgaccagcatttccctttaacaatgacagttgttaatgaccctcccccaaccccttgtgctttattgtgtagcttagattcccttttgagctcttgaaaacatggtgctgtgttgctcttaggcagatgttgaaaagagtttgtaatgaacattggttcaaagggaattggtggtttcaaggtagaacatatggctgaaattgctttctaaaatgtaatttgcagtgcttttaccttctagtgaattctgtggtgccacatgaggtagaattcaccttctcaactaatgtgtttgtttgtttgtttgtttgtttgttttttaaacttaggtttgctgtccatgatgatagatcccatccacagtgggatttaattcatgcaaaacatggccagcatgaccagaaagctcaggatctgaacttgtaagcacacttgagacccttctcttaaacgctcctgattctttcatctcagttagttctttcctgtgagcacagtcaatttcccctaaattctggaagggcaacagaatgggaattacactttctcggattgaattttatggctttaaacaagggactacttcttttccaactgtatctttcaggtatgtttcagactcttcagctctgccttgttgtgaagaaagcatacagttaagtgaccttcagtctacccctgacctctcttccattaatgcttattatgcagtgtctggtcagaagaggtccctgaaatagatgttttcctcccatcacagggacagtgactttgcagctatatctggaattgccttattgtgatctttcagttggggttttgcaaagtagacataagcactccattaatataagcagagaaatcttagtgatcagaatttggaaattcatgacattttagaatgccaggtttctctcacacacacccacagaaatgttatatgaggaaaataatgactataaacataggtatgtaatgtactgtatttgtttactatctgtaaattacttgtttttagaggtgattttatgctttgaatgcatcatgggttttaatctactatatgtatttgcatccaaggaaccaaaaaaagtctcggtataactttaggttgctgtggaaaatgttttaatgttttaattcaatagtttatgatatatttacacacactgatgcatacagcagatctctggtttggtatatgtatcttaattgactatctagatttaataattgacatatgaaaaaaaccaataaaaacacccattctgtttcattttaggactatgtaagtcctatcacaaaagcatcctacatttcatgactaggtaattcctatcacaaaaacatcctacattttttttcttcacaggaagtatttcccattgctctctgacatttgagtttcatcttttgactttctgtgtttaatagtctctgtttatagttgatctggtgtgggaaactctgacccaccacttaaatgcattgtctgttgtcacaccacagaataatcttatgttcctagctgtattgtcatgcatgtgttacactcattataaggcttccttagaataaaacatactgtccaggtttggttttgaagtataaaggcaggcagaaagtagctaattttaatgttagggtggtgccactttctattcctaggctcatcaattaaaagtgtgtttgagtgtgtgtgtgtgtgtgatatgtgccatagcagtcatgggaaggttaaaacatggcttttaggagacagttctctttcactgaggggctaagatagtgaactgagcctgcctggcatgcacttatacctgttgagccatcttgctgtccagacttttatcttttatttttgaattggaaagaaaccctgctatttggttttgttttgtttgtttgtttgtttgtttgtttgttgtgtggatctatttatgcctgggactatattaatctaaagatggtattcataactacaatataacatacatcttgatttatacttcctattttaaaataaattatataccatattatagaaaattatttttacacacacctctaccaggtgtttttggattgcaggtgaaatcctattgctttctttactaggtacatgcgccttggtcctcgtaccttgacctggagcaactgaccctgttaaggtggtcctgacagtagaggtggtagttcctgtctcttgttgacttctagcattacttgcttcttgctttgaattgctacaaaccactacaaacatcatggctgaaaacaacatgaacttacttttatggtactagaggccagaagcctgtcattgaaagacccacaacgtgaggactcccccacattctgactcaggagaggcgacaccccaaatcacataagaaacgatcttgctgaaaactgcaagaggacttttattcaagagcgctctcgggcccacggtcatacaccacgcaggggtagaggactgtggcacacagagtagctgggtaagggggtatttaaaggaagaaaccacaactcaaggaagtggggagggctttgttggaaaataccaaagataccagttaagagtcccaaggaagtgcaaagtcacaagagtcacaaggaatacctggtaattgttctggttatctctcaagacagtttctaagagtccctaacaatagcacatttgcatagcgggttcctgcaatggtcagggtgactttctttgaatgaacactctttgaacccaggaatctggtgggtggaggaatgtcgctatctgttttatgattagcataccttggagcattaagtcacagaggtcacattcccaaacctgggcctaaaggcctagaattttgtttttacattatactttcatcatcaacatatgggcaggtccacacaccctctgcagtctcttagcaagaatcctcacttgtctcttctggctattagtggctctgttgtttcctaagtttgcaacatttaagtgcctgtgtttgaccctgtcttcatatcatcttgtaaaaatctctttgtgttcagcatccctttcatttgcatgtatgtggtgagcaggattaccatgtgtgtccatgtgtatgtgcatagagggtgaccatgtgtaaatgcatgcacagagaggccagaagtcaatttcaggtatggttcatttttacttttgagacatttgtcttttaacatgtcaagtaggctgggctcacttgtcagggaaccaaaggcgactgcctatctccatctcccttatgctattattataatcatagactaccatgcttagttctttccatgtgggtactaggtactcaggtctgcaggcttgtggcagtaagaaccttataaactaaattctttccccagtctctctcatcttttcttttataaaaacatcagttactggacttaagatccacttttagtgagggatgagtccatattgagatgctttattatgtctgctaaattgaaaggtcaagtaaaactatctcaatctcggaaatgtgatatggggccacttgactttctctgggcttcagggcttggacattcctcatcagcccaggagaccagaggggatttcagtgcaggcagttcaaggaaagctccacctggcagctcctctgcaggctccttggtgagtgctccaccctgccagctcctccgctaactttttctactttgtgccaagcctacttctttcagtcatgccttcccatctctgggcaaagacatcctggtttccaaatggtaaaagctcaatgcattgtttgggaaagaatgaatatagtgtggtgcaagagatgaagtaaaggcctgggagctaggaggggctgcttcatgtacctgtcatagtccttcccttgctagagctggaatttggaccagtcatgcaacatctcccagatcagcatccaaatctcaccagacactcttcctcccagcaccatcacatgactgttggcaggactcagctcccctggggagtctgactgactgttgctctctgagtccttgccatagggggttatccggagggcagctagttttttgtggtagagcaagcatgaagactcaggcaaaaaacaaaggttggagtcatagtcatttacaaacaaattgtggtctatttgttaaaatgtaatcattagatatagcccaaatcttaaaaagaggggcttattaaatgagtgtgactgaaactgggaagaatcattagaagcttttttagaagctgtgaagcaaagcccctgctcaggatttatatcatcatcatcatcatcaccatcaccatcaccatcatcatcatcatcatgtcatcatttggaccgcatctcctagattttatagcttggagtaaatactgactcttgtaaagtagaagagccttacgtcaagttggaatgcagaggcgcagaggttaaaggattcatttgagaagccatgccgagcagtaggcacagtactatgataagaacttcaatcagttaagatcctggtgggtcattatatcctgaattattttgctacatgattacacatgaactatagagcttcagaaataaactgctatagtaggccaggagggaacaatatgagcagccatttacaatgtgctgctacagagagaatagctaatagcagttctttcaaactgcttttctaaaccatagtttgtgtatccgctgtaactgctccttgtaataagctgcagtggctacatgctcattcttgcttccaaatgcttgtttctgaagccgccattgcaggcagatattcttgggagaaggcagagcatcgtttctaggcatttccaattctaaataattagagtagaaagactttcaagtcagcttcaggttccagcttgttatataaataagttcacaggaatctcagatgctttacaaaaatctgacagcagctataaaaggcttttgaacatttttgttgccaaagtcctagggattgctggaatcttaaatagcccgttttaagctccaattcagaagctttttgtcatgtttaataatgtggtgaataattccttttctgttagtcatttcctcctttataatccatgaggatctttgagccatagaatggatatttttctggagctataaattaaaggttctttcaatcccaaacttgaaatggctttttaatacaccacttctataaatgtatttatctaggtttaaagtttcattagcatacatttaaatgaaagtcttatggagatgtatgtgcaatccaaggaatgattactttgaaatgagaattccatggaagacagtgggtgatactatggactatagacattttactaagaaggaaaccatatttttagaagaaattaaacactggatcttctctcctctcctctctgtctttctttttaagtgtcggatgaataggaagtttggttcaggatccagtggccaccattggtccataggtagataatactcataatatttgtgacccaagacagcgacataaaattatgtttctgcttattcacctaaatagaaggtggcctgtttttacagtatgattattttctaaagaccactgtttgtcatggcattgttaatgacctcttcactaatagatgtctataacatccatgggtttacaggcctagtagagattttgttttctacatggacatggtatattcatcaaatccccatctaagtagttgtccaaaaagctatccccttaggttattatgatcaccaactttggctagagaagcccccgtttacagtggatagctgtaactatagcttggctcataattggtcaaagttctgtaactaagggacagctgagtgctcagccataaataagacttttgtatcacccactcgcccctggggatagcacagaagacaaggcagcaagaatgtaggggaagcacagagcatggtacatcgttgtcttcaaacaggccattgctctcatactcttcacctcataacatggtgattgacagctcaagacctgtgtaacaggggatcagcaagcatacagggcccatgagactctccaccctcaggcccattaggagaacagttgtagccagagggaaggagggcacaagaaaccactcctgcttgcagatgtataggtagttgatagttgctagcagggaaacaggcagatccttgagtggcacagccactggtaagaaaggagcccactttcctacagatagatgctcacccagcactctgtgagcaactctgatggaactgactagggcaccaaaaagcaaacaaacaaaaaacctagcaaatacagtaaagtagaagaattcaaaagaggagtcagttcagcaggagagcagtaaaagataggaatgggaatgaagaagataaaaatacatttcatatgtatacaaataccataatgagacctattaggtaaaattaacacatgtaaatcaaataagtaaaaagaaatttatgatattatttaatactaaaattatggccatctgaacatactatttgagcttttaattattttgaaaacacagtatctagtacctactgccatgtcttatttaacaactaaatataaaatgacaaatggtaaatatgtgttaacatattttgattgctgtattgcagtataactgagatcttctgctgggagtgatgcattattacatactcagaggcatcctaggagatgtgcaaagactcatctacaaaaactaacttattgtgcttcgacctataaagcttataggttgcttaattaatctgacattcatcaaatgattcctgggtaactcagtgccatcaatgtttttatgaagttaatgtcttggtagcctgccttagaagccactaacctcttgggagaccaccaatgactttcacctttttcatcttcccctttgatgtctcctttcacactgtaaggtattgatctctttgactaactgaatagaatgaaagcctgtgtgtgtgtatgtgtgtgtgtgtgtgtgtgtgtgtgtgtgtgtgtgtgtggtgtgtggtgtgtgtgtgtgtgtttattctaagactgcatcatgaaaactcactttgcagcggtgcagggaagtcaaccatcactattagtgaggacatttcaggagtcccacaggaaacttcaggaacaagaatgaggcctcccagcaaccagcaccaattccctgtgcttgacaagaagccatcctatagatggtgcctccagccccagtcaagcttgcagattgctcttcattctccaaggagtcaattgctctctactttctaggacctggagtcaaaaccattcagttaagctgctattgtattccctgaccagtaactttaccataggagataaagttgtatatgaactttgagaatgatttgttaagtcataatagatagctgacacagggcttgttagtcaaccacaagatcctgatattggtgaatgacaaaatcaaggtgagatgctagccctgttgataaaggatactatgttattaagttagtacagaaattcaggatgctgtgtcccttattgtctttatttcgttcattgcctcttcttccttcactaattccagtcttttcctctcctcccttcccatcccctctcttcccgtcccctcccgttcccctttaccctcttcttttctgcccttccatataccatgtaccactggcactggacaaaaatgataaaatagatcaactcatttgattgcttcagattttcaagaaaacaccaagtaaacaataagcatcgggcatgtattttaaacagaggtcagagtgtcaaatgctatcttactgaaaaagtcttgtgtatattcagaatgatatcttttgttcagcaaaataatatgaggatgttgataaaaatggaaagcatttgttctgttacagagcaaatccctacagaggtagggattgagtttatagggagtggtgaaagtcttcagttagcttgccagtttctctgacttgctcagctgctatatttacagagaatgtctgctcctatttgaggtcaggatgaaagatgaatggggagaggaaggctggaggagaggatctttgtgatcccttggggaagggaagaccacagtaggtgttctgctacagagctggggtgggtgggggcaacgggcctggaggggcagcagaaggcttcccttgacatttacagtcactttgatgaaactgtccccattttagtgatgatttgactgagtttattgttcacaaagaaaattcataaagtggcaagagttttctgtgtgagaacaaaaagtgctggtactagttaataaattatcccgctgatgtaaatgaagagtcaccaggatagcatttatttaaaaggaattgtctgcttgggaaagtgtaagaatatcactgactttgtaataaaaaaaaaaaaaaaacaaaaaccttaggaaagatcatctaaaaataacagacttaggtagggactgtcttatacttgaatttatattcccaaattgaaggaattgatctccagattatgcacctatctttcaatgatgttcaagagaaagaatactaaagaagaaggacctcagtagtataaaagcctgctggtagaagaccattattgaaatagtaaacactggctttctctgctgctcttctgtctggcttttaaacaacattttcattatgcttgctatactagattagcttgctagttacaaggaaaattcagatacagctctctatgatatcaaaatatgtttaaactcataaagcaccactttgaggaaaatattgtgagaagtactgtaaattacattgttgatgtatgctaatattgaaaatgtcctttataagtacttcatttaaaaattcaattctgtttagtgaaatatgcatagtaccaagggacttagaaaatagaatgatacataaaaataacaagaaaaatatatttgtttgagggcaagtatttgtaactcttattaccttccagggttaattatcctaattcatccaaactgcttgaaatccataaaagaatgatgagagaccacccctccccagaaaaataatcagagtttaatgtggttgtactggctagttttgtgtcaacttgacacagctggagttaccacagagaaaggagcttcagttgaggaaatgcctccacgagatccaactgtaaggcattttctcaattaatgatcaagggtgaaaggctccttgtgggtgggaccatctctgggctggtagtcttggttctataagagagcaggctgagcaagccaggggaagcaagccagtaaggaacatccctccatggcctctgcatcagctcctgctttctgacctgcttgagttccagtcctgactaccttggtgatgaacagcagtatggaagtgtaagctgaataaaccctttcctccccaacttgcttcttggtcatgatgtttgtgcaggaaaagaaaccctggctaagacagtggtatatcagctctccaaaaatgactgtagttgcatcttcagttctaaattctggctattgagaagtgtctagggcagtgttaagctgagtgatgtggagtatggttctccttagccaaacggacacttgaaaaagtcatcaagggtttcattaaaatgctatactttataaacataccgtctatcatctgtttcatgcattccatttataacgtagttcattgacatattttgggtgacagtaggccaccaggacaatttgtgggccatgaacttatttttggtatcattacttatatctaatttcattcacatttcaaattagtgttaatctcaaagtaatcttcgggtaaattgtcattttctattctacattgctacagttatatttttttcattttttaaaaagtttataatctttattacaaaaacattgaataaaactcccagacatgtaccaaaattaaccaaagtcaaagactatgaaattataattttcttttttgtccatatatttttattagatattttctttatttacattttaaatgttaccccctttcctagtttcccctctgaaaatcccctatcccctccccccctcccctgttctccagcccacccactcccattcctggtcctgctatactgaggcatagggccttcacaggaccaagggcctctcctgccatcaatgaccaactaggccatcctctgctacatatacagctagagccatatgtcccaccatgtgttttctttgattggtggtatagttccaaggagctctgggggtactggttagttaatattaatgttccttttatggggcttcagttcccttcaactccctgggtatttctctggctccttcattggggaccttgtgctccatccaatggatgattgtgagcatccacttctgtatttggcaggcactgtcagagactcgcaggagacggctagaaattataattttcaatggagccccttaattaaggtagggtaactctcagtaacagctgcttttatttttcagttcatttcaattgacaaagttattagaaattctttaaaaagttttgatctcatacatttatgaagaaactattatttatattacttatttaagttattactgaaaggaaagtgctattttcttttatgcagtccttaggtttgagcttaagatgggcttcccacaaagcatctttcaaataaaaatgtgaatgtattacttacatcaaataaatctaagagttaataattctaataggaagtagatgtaatttggaggcaatttgaagataaagatatttataggcattttgtttaaaaagtataggtgagggaaaggagaatattcgaatctgatttctagtttagatatgaattaaattatttgcatgaagtgagatgaacatgacccttgtaatttccttttgtatcagataaaacttgcaggctaacctataacctcatagttttaagtaattgtaacaaagtcaacactagtttatcatcttgaagaactctctaatattagggtgggttgaataagcaaaatctattatggtttgactatgaaatgcttccccggaacattgcagtgtggaagtcgtagactcagctccaagtgctacagaaaagtaactggattgctggggcctctgccattatatatcaaagcttttaataagtcttagctagggtcactgactcttgaatcatcttagctgccacaggaaatatcaagaacaatcatacaggaatgtcccttaatcaatgtgggcagtttgacaggtgtcagaaagataaatgattaaatgcagttatttttgcaagcatccttgagtacactgattttgattttatcacagactttgtgtgtagtagcaacagtggataagaagggtattaaaatagccatcattttgaatgaggctcatgtggtcaagtgagtggggtaggatccacatttgacctttgaccttgacctgtgtatggagagcagctcagccctgctgctttgcttcacacctgcaactggattgaggaggatacttcattttcctgaatattttgtctaacttaaacctgaatatcttctcctgtgtcctttcattcaccatttggcaatgtcacacactgagccgctgagctccttaaatgtaagtgatacccatttttaaggaatactcatttcattcagaagggtatttttaggtttatggtaaatttgttctcatttttagtttgttcttcagacaaatagagtaatatatgccattcttccttattcttattgaatattttctactaaatctatccttttatgattctgaaatgccagcttcagtttttttattaattcatactgacctgtgcagagctgtctgtctcaacttaatgactatttataatatatggatggcattcccctgccattaatgtttaatgaattggctcctgatccaatggagtctaataaaggtaatctttagaatgcattgtctttcgaccgtgccctcagaactttctttccacactgtatacctttggcccacaccttcctcctctgtctcttccagtgcactcatctctcaacctttctttcattatttattccaaatgagtagttttacacttcatttttttttttttgctaggtcagaaggcagtcttttgtggtgaaactaaccaagtctcgggctactcgatggctggaaagtcaggctgcagtcaggcttgttgcaagttaatcatcgttttctacagtcagggatccctcctagaggcctccactacagccaactttccctttatgtataccgaatacgagggctatgttgaaaatcaacattatggggctgcagaggtggctcagtggttaagagcttgtccttttctttcaaagaccagagtttggatcagagcatggatatctgagagctcactgtcacctgtaactccagatccagaaggcccagcaccctcttctggccacagcaggtgcacacagacatacacacacagagatacacagacacacagtcacacacacacacacacacacacacacacacacacacacacacagatacacagacacacacacgccaacacacacttagaagtaaaaagtatttgaagtaaaagagctggcttctggaaagatatatgactttgtgaatatactaaagattcctgaattgcatgcttttataagagagcaagggcttaaaacttgaagtgaatgaactaaggaagtaaagccaagtggagagggggaagctaattcttagaaatactgctgtgtacatcaaccatgcacatgctcacacacacccatttccatgtccgctatgcgttctcatcaatcagttcttttaatatgtgcagtgaaaggaattttatctcacattctgaaacccctctactctatacagttgttcttgctgttgaacattgacacaagaggccatactttacagtagtggtgtcctcctcccgaagcctggctacactcataaggcgcagtctccaggggctgtgttctttcagtcaagccccattcttggaactgcgtctacatccaagtggcagttcaatccatcatttgagtccttcaaacaccgaaatgaaatgtaagtaacagattctccctggttctggtttctggttcctggttttggaccctccccctctcctacccaaagaccttcttaggtaattttaaagatatatttacttttaagtataaatgtgttttgaagtttgtgtttcagaaaaatggcagataatacagagttcttgcttcaattttatttattaatgttttaagtctgttatacttgaatcatcaagccaatattgctgttaatccatataaatgaagtccttttttttttttagatttctgtgagtgtgtatcatctctatcattacagttttacacacatacacaacattccatactgttctcacaattccttttattgaaccttttttcttcatctctggttttgtcatttggagtgtggtattgttggcatagaatagtggaggttcattctgcactgccttctttcattacacgatgcacatttgagattatgtattttcatgggctgctagttcttttctttttactaacttgggagggtattaggagtctcttttaatacatcatactgggccagaactcacaatacttctgtcttagattccctactgttggaataataggtattcagctggattatgggattctgagatcattaacaaagagctgcagaaaggttttctaaaatatctacatgatattgcctttccaatgaatgttcctgagtcttcctggtacctaaacctgttagtttgtattggttaaatgttagcacgtatacagtggcaccttgcttatgtttacaatttttctaatggcttctgatgttatgtcttttctttgtttaatgtttatatatgttctttactgaggtgtctgtaggttttccatatttaaaattagattgttttaattcttttaaattgcctttacctcctatttgtctgtctgtctgtctatctgtctgtctgtctatctatctaatgtgtatggaagtagcatagccatgcatgtatgaaggtcagagaacaacttgaagagaaagttatttccttctattaactgcttccgagggatgtattcatgtcaacaggtgtggcagaaagcacccttactcatctagccatctctcctgtatgaattttttaccttatagttgagttttatgagtttttaatatattttggaatatcagttttttcatctgtcatatatgtgttctacaaataatttctactactctgtggcttaccgtttcattcttttatagaaccttttactttttagtttccaatgatcatttattgcattttcctttgttactgttttttaaagtaaccgattgtattaggtgtttttataatcctacttttttgttggttcactttccccatgtgcccctcattccccttgtcccttcctatgggttcctttttcttcctttttccttcagtcctcatctaccccattccatccttttttatttaaccttaccaactttcccttaaagtctctctttcctcttcaaaaattttgttgtcaattttcacaatctatatcatcccatatacatataaaagaaattaaaatgtaaatctgattattagataaaacatgacatttatctttctaggtttaaagtattgagataatgattttcctttatatctatttgctgggtgtcataactcagccctactcccacccctgccacacacactggtgagtagtgacgtgattgttaatatgataaacaccactgaatcttggcttagatttgaaggtccattctacaggagggaatgcatgcccattattgtaaacatgatcaaaaacgcgtggctggaggtcatagaccccatgtaggacctgaaacagtgttttagcaaagataacatggcaccaaactgtagcctacatatgtatgcttattcccatagcagatactgctctcatcttttgtcccagagcttttctttatagggaatgcaaagatgcatggctgctcataatatttagcataaatgatgctttactgataagtcagaaaggacatttatgccatctcctttagggctcaggtaacatctcaaagatgtcatggtaagagtataagatctgcaagacagggagaggaaaaaagcagtcatcaggccataacgtgatctcacaagagctataattcctaccctgggctgcacagggcaggccctggccatgtcatgggtgaggaagaggctcgagggggctagctctttctgttgaacagttagtaactgatgggtactggaagaggaacagttgttgccttcagttatgtatcaaatggtgatcccatcagtctgcaatggatagtaccaaactcatggtcacacaaacatccctaggtaaattcagagggtctcacacacacacacacacacacacacacacgagagagagagagagagagagagagagagagagagagagagagagagagagagagagagagagagaggaatgaaggaaagggccttctgcattctgaacagatgctccagaactttgatacatgcttaacactgtagatcttaaaggagaatctacgttctcaccattaggtgtaaagttttctttgttataggttgttaatagagtttttctatcaggttaaggaagttatttctgtttttagtttgccagacattttaaatcttgagtatagaactacattaaatactttctctgttgatgtgaattttcttctttagcctcccattggtatacatattacatttattgattttttttgatatttagtgttgtttccatattttgcagatctactctggtttaggcatgaagtaatgacttgggaagtgttccttttgtttctgtttttttcaatgagtatgtagacaattggtctcatttctttttcaaaatcctgatgaagatgattcatgtcatctgctcctctttttgtgggttctgatggattcagtcaaggaattggttcaatttatttaattttatttgctcttatttttgagatactatctatcccactacatgatcagaatcctcctgtctcaagctcttgaagactggagtaaagtgtgtgcagcaatattaggctcgtttcaatttattcatgttgttgaatatttgattacagacttatttctttagcatatttttgtgtgtctggaggaatcagtaattatgactcatctttcataactatattaataatacagattacttttttctcttgtgttaggatctggccctgaacttgctatatagaagagactggttttgaactgtttaatcctcctgcctctacctcttgcatgctaggattactgctactattttcattaatattattgacttttaaatttttaaccttttttatttcttatatatgcacagagacctttgaactgtcttgttaaacattgtttcttctgattgttttttgttattgttgttgttgttgttgctttttatttttcaaggcacagtttctctttgtaacagccatggatatattggaactcactctgtagaccaggctggccttgaactcacagagatctgcctgcctgtgcctcccaactgctgtggttaagtgaatgtgccaccgctgcctagcatttcttctttatctctaaaagtttgagtaagttagatttgtttttagttcagttcaaatatgttaaaattgttttaaaggcattttcgttagcaagacttatgaagttttaaaattaaatacttagaataatccctgagacattaggatgctttatgatgtttaatgtctgtctcagtaggacgtgggctgtgttcaatgctggtggttgttgtaagtgctggtagtcgacttccttgtattttttctctcttccttgtctctacacttctctaaaaaactgcttttgaaatggaacccatgtctttccaaccttagcaatggtccactgtagttgcactgacacattcctgaggccgtggttaggagctggggaggggacatgtcctaccatgccatgttgctgatgtaggtttttggtgttgccatgtctttaaatctaattttctatactgttttctagcttttttcctcttctgccttcacacttgaagaggaaacatgactaggaaggacaggtaccctttggtccacgtaggctgaaactttggtgtttttccaaggagtgagacgatttaaagagcagcctgagaggcttagaaaatggttatcttttctatttcgtcagagaagtttatcccaggcttcaccaggaagttctcaagataaaatgcatatgggtgtccaagattttgtaactttaggtagtcaattcaattctccagaaattggtcattttttttctctgttcttttattatttatcacagtctatcagtcctccatcctggtgtcagcagcttagctgtccttaactctgattcttttaaattgtctgtcctatgttttggggtagtggctgcccctgtggccttagctctctgcagtatctgagaacagccattgattttttttttcctgtgtatagtttattttccattgtgagctttcactcctgtgaacaatagtttctgatatatctctatatgcatttctagactttaactattagtgttgaaaatgtttacctgtgtgagtgatttgcttatgtttatggctgaacactgtgctggccagaagaaggcatcaggtcccctagaattggagtttcaggtaattgtggtgagctactatttggatgctggaaaccaaatcccagtcctctgaaagaagttccaacactcctaaccattgagctatcactccacttcatctccagacattaaaatgtaatttgttcatagataaaacctggctcattcagaaacagatagtttcttacttttttttttttttttttttttttttgtggccgagacagggtttctctgtgtagccctggctgtcctggaactcactttgtagaccaggctggcctcgaactcagaaatctacctgcctctgcctcccaattactgggattaaaggcatgcaccaccacacccagctagtttcttgcatttttaattctctcttgatcatcatcagctgtctagaacacaactaggataacagtacagtgtgtttttaagcaagtatatgttatatgtgttatttttttatgcctattgtgacctatttgaaaaaggtcacatgattttctgtgttccatttcattatgttgctttgtaaactgttgatgcatctttagtaactgagataagttctcacaagtttatatgttaagactcccagatgagaatgagtttgaaatgaatattctatcatttatactttgtcttcctgttctcagctgtgaactgacatccttttttaatgctttctctttacagactgattatgatgtgtcagattatgtctttgggcctttaaaatatttctataagaatagacatacatacatacatatttaagatctacctattctctcatactgtccttccatcaagtcagctggtggaagaatggtaattactacattgttttaatgtataggacatactttaatttgtgcacccaaagaaagtcatctaattccaaaactatagattgtaaggctttttatggccacccatgagaacacatgataacagagaaggtcactttctgccatgtagcttttctttccaacaatgttgatcccaaacaatctgagaaagtaacactgctcaaccttggaacttagacaattagtagtcacatatctgccagcaattctgcctgcattagactgatgacctatgtccaagtcaacatctgtgaaactcacagttttctgatttaatggggcacaagatacatgctcattcaactcagcacagagcattagaaatgctcctgatgaaagaaagctattcattcgtatcttcagcagtatgaaagttcagtacactgagaaaatctgagtcttttcatataatagaggagctaggaggtcatgttagggcttgcctgggggatgtatagacaagtattataagtaaggaattgtttagaatcaaatagagtttaggacaaaaataaacgttgtgttggtagcatagaatattgtggttctcaaataagcccagatgaattagctgaccactctagtgaattagaaattcaggtgggctgagtgtatccagggaacaggttttcctgagagcgtagctaagctgctttgtttgttgtttgtcataatgagcgtggtaaaatccatgttctagagttttcacatggacaaaagagtttcagttgtcatgaaccaataaactttaattttttatacgtgaaaagggattaagtaaaaggcaaaagtccatgccctgttaaatgatgggaaaagattttctcatcctttcccctgtcatttcttaataatttaataaaatgtgggaaagatcttttgttattctaatataactgttttagaatgcaaattgcaatagatttgtcccataaactgaagttatagatgtctctaataaaaaccattttatgttcttgcacttataacttttcttgctaaattcaacaacatgaatgttttcactaacaatcctcactacataggctgccctggggttggctaacctggctggcttggcctggcctaggttgggctaactatggctgcgtattaaaagacctgttttttatggattagaaaacatggcaatgccaaggttcattcagttgagctcccagagagtctgttcgctgttttaataaatttgttgtttctcaaattatttaaggtagctaggccagttccttgattcaaggaacatttcatgccattgctgctgttgtcatgggtagagttttgtttcagattcatttttgtttctctaaaactcaatataaatatagcaaatggccactatttgcaaatgagcagacaaaaatatagcatcaaatcgatgtatagatacactggtgttatacctgtggattacctagtccatgtggaagataaatttttggcaaatatttaggtggaggatttttattgatttattccttagctgtttattgagtgagccaactggagatagcatggtgtggatagtgctgaggactgggagcagaagacattagtgaataataaggacacacagccctctcctgagaatttctaagcctgagagtgagaaagaggctctatccagaaagagatgtacaattttagtgttttcatttctttcatgtcactgtgaccaaagcacccaagatgccagcttgaaggaggatttttccacttctggttttagagattcatccaggtcagctcggacccacgtgctcagacagagcatggtgacagtatgagcatatggtggaggaatttcttcatgttatggtagaaaagaagcagcagatcagaggctaggtgcgagatactccccatacccttccctttagctgtgttccaccttctaacatttccagaatgtcccagagaagtgaaaagtcctggggatcaaggctcttgcacatgattgctgtggggagactgttttatgtgcaaactataacatactatttcatgagcatgaaaaagagtggttcggtgttctaaaagcttaggcacctcctgattaagaaaagcttaggatgccaaagctgaattagatgtggaaaaaagcaaagacaaaaaaaaaaaatcgtggaaaataacaaattaatgtcttctcagcagagaaaacaggtcctgtgggtgtgcaggaaaataataagaagtcaaggactccttcaaataccagaaagcaatgtgtcatgcttgtgctctatacatggtatattttaaatattaattattttaataaagattatataaagtgtctctttaatattttacatacatcaagatgagatgctattaacaatttttaaaaaatgtttcagaacatcactcttcttgcgattttacacatctctggaagcccttcagacatgcccttcagggagattgctttcccatctcattctagccaataataatggcttctttacattaaatacacaatgtgggacttgggagggaccatcatgttaattgctaccttgagagggctatttcctgccatcttgtttattgaccatgacaagaatctcaccagaagtacattcttctaaaaaagagaaaaacctgaaaggcttttcttctaggaaaatttaaactagtaattgaataaaatttattccaaaagagaattggatattaatttaaacatagtaagtttttattttacccaacacttttgtaaaacaaaaaaaaaaaattctccaaatctctaaacccttcttttctgcctactgaaatggctgtgataaaattacctaactaatcaaattacaccttaccatacacataatttgtaggtaaatcttgtgtgttcagtatcgactctgatctgtgcagattttacctagtgaattgtttactttgttagagaagccctgatcacacagaggaagtcagttaacttcatgtagaatccttagccacaggttattttgacagggcctacagggccctattcaaacggggctgagtgattaatcatgcttgtcacttgtccgcttttgttagtggtggatggatagggcgctggaatgtcattttcaaaattactgtatccttttgcccagggaaaatcagaggctgggaagcagacttactccatatctgtgaagcgtttgctttggtctgccctaagtggttctttttgttattattttttaaattgaaatggaattacatcacttctccactcccttttgtacatccagatcttccaagttaatctctgtcaaacccttccttgctcctcactctaaatctgctatctttattttctttgaggatatgtgttatatgtgtgtgtgtgtgtgtgtgtgtgtgtgtttatgcacgcactgagctcatttctgttgtttgtgtgtatatagtctcgagactaattatattcatatagaaaccaataagcaattcattgcagggagaggctaattcttctcccaacagtcaatggttacctacaggttttttttttttttgtggggttaacctatgaaattttatgccttttatgttaataagtcctttgttattgctatgcacttatttatacagtcatttgtaagagactatttcgcagacttcctcatattctggctcttacactctttttgccccatcttcttcaatattttctaagtcatatatgcagaagctctgatagagatacatctattggatctgggctcatcacaatctactgatgtctgcattgtgtccagttgtggtttcttggaataatctcctataaagagaaacttctttgaggagggaggaggctatactgatcaaggaaagttgtctcgaacaccaaggttcaagttctagcacatctgcttctatgatcttaactcactttgttcaaaagcttgcattcagtggtatcttcatcattactaccattcaaaatgtactgttctgtctgatcaatctgtcaatctctttatccatcagtatttgatgagttcacattggaacccataggctatgaatagatgagaagtcatccttgctgcttcccatggatatccaagcaggtgatagttacttggtatgagatcatgttgctcagtcaacttcttccatctgttaagatctgtatctacattgggtggcctcatctgcctaggttacttcctccagcttatcctttatgcagctccatctgccaccttcatactacaatgtcagataaggctaaattaactgaagttagtgatgctgcaacatgggcaccattggtggccattgttctaccaactatacctagtgttgacatactcacctatggatgaggaatattgaggaggcttgctatgtaatgatgaagttaatgtcaaataatctcaaaaatatctgcttgcaaattttccttctgaaaattgccctcatcagatgtctgctttgctatccctgactttgtaggtccttggaatgtttctttgctttagttttttgaattataattactggacacctaatgtgcatcaaaatataggatcaggacagttgagacatacttctgtgaacaggaaatcactttttgagtagataggttatataaataaattatgacataaattgttttcccctaaaacttataataatttaacctgtggttgggaaataaaacttgaaaactatcctaaagctttacttggcaccctcaatttaagtgctgtataagaaatgctctttcttaagtataagaatattatattaaaatcttgtaggttgaacctggagagatagctcagtgtttatgagtgtgaactgctcttgaaatggaactgagttcaaccccaacaattccttcacagctgcaggtaacttctgctacagggatctgatgcaactcttctccaagggtccctgcatgtgcactccctcccccaccgcccaacacacacacacacacacacacacacacacacacacacacacacacacactaaacataattaaaagcaaagtaaatctttaggaaatctcgaaagttttgactcattttcataaacttaaagtaacattgtgttaatgaaagacaaaatttttagttacttcattgcccacttcaacttcaaggacaagtctgaggatctatgattgacacccatagcttgcatttaagtctgaaggttatttattaagtgacattttcagcaagacacaaaacctacctcctctttagcgattgtgtgaagtcacttttagtacatgtgagaaagcagtgaatcagaatatttatggtttagtacttttaaaaatgtccttcagatatgtgtgcatataatagctctgtataatattaagtccaagtttcccaggtcttccaaccacactgcctggatgaatgactttgtatttacatgtgcatggtggtcaatattctaagaataatagaatatcagaaaaattattttcttgcccacagttccaaggtcacagttttatttttaccccaactgaccatattgagctcatgtatattttctgagtgacttaatgaatgaattaatgagttaatatgtaaaataggccaagttcaatatgaaaggttaaatgctagctaagccctttgaattctcaggctcagactttgtcaacacaactgtcatatttattgtatttgaaagccagtgactcattgcataaattcactgcacctgaggagtcttcctttgctttttgagggaacaaagctggggattttgcctgctaagtatgttaaaatatttcatttgttaccaagttgctttatgcccaagaacccaacttatataaagtataataggaatttttccatgttatccttaccaagttttaaaatatctttgccacactgtgcaatttataaacatttgccattaattgtaggatgtgtgtataaagtgacttggacccacaagactggtgaattaaagaagcaataaagaacaccccctgtggtacccctcccaccttttcctcactccctcttaatggattgttttactataaacagtacttagctccctgctcctaaataggctgccgctgatgaaaatgccagatctttttctctgcatcttcaaagtggaaacagaagctttgtctcccattctgtcctatatctgccattttcaacccccctgcctccacacacactctttccatgcacttaatgaagtcagaattaaatatttaccttagaacactatctaaataccacctgaagcagaaccagggtgttaactactgtaacagtccttgtcctgcctgatttttgctgtctttgaatataattgttttcttgttttcaaatttgttatgattttgcacaagcttactaccccccccccccccaagtctttaggagttgctagaacatcacagtatgatgaccgcacgcactttctagcttcctatcaagggcatttcttgaagaagcacttcctggagctttgatgtgactgttgctggtgggttctgtgctggcagccactaccctactacaaagcaaaactgagcttactgggcatagcagagtcctggctctaaagagcaaggaagggtgtgagaaagtctgactgcttcatttttctttgctgcaatttttttgaataacatctttatttacctgactgtgtatacaaatcttacttcattcccttttggtagttcagtaagtttgactagtttcatagccatcactacactaacttgagaccatttccatcaccttcaaaaggaaccttcatgctcatccacaaatgctccctgcttatcaagaagctatgctgcatggctccattcccttcctgtatgcatcagggctttctgcttatttgctaatacctttcagttgtatgtacaatttgtttatatcattgaggacttgtgtgtctaaggattgttccccctctgtggtcttacaatgaccctattatgaacgttcatatacgagtttctacacagacatggatatgctttcatttcttttcttagtccctccagtttacatacattatctcaatcattaaagacacgcctagatgctgcggtggcttctgggttactaatgctattattacatagggtccgctagcctgggtctgtcacactctgactttacaggtgggggctcccacttccagcacggctaccccttattcactgtttttggttacagtgcctttggggtgaaagtcttatgatttggtgcctttaattcgatattttctggtgtgtgacgttgttgaagttcttgtcgtgtgcttactgtccatttgcatagtttgtttggagaatggctggctagatgcttaatttgctttttaaaaacaagattatctaagcatgtggatatggccaaagtacatcacatgcatgtttgaaatgatcccaatcaattctgatatctgaacaattagtatatactaataaaagacagtaagtatataataagtatattacttattgtaaggattttggtgtacaagttgcttcccaaactcatctgtacattgtctcttccagttttcaaattgtcttcacttctttgatggttcaagttataatggatattaataaatttaaaaacagttactaatacattttgatggggaccaatttatctatcattttgattttaaatgcatatattacttatgcctatctaagaaaacactactttctcacaaataggaagattaacactacggtttcttttaagttttatagagtgaatagattcattatgccattgacccactttgaattaatttttctgtaaggggaaaaccttgatttttttgcatataaaagtccactgtcttaggagcatttattaagaaggctactctgtttgcttatagtttaaactggtgaatctcaaatacattccctatttgacagaattttgtgtttcccattctcagagcatatgttacctttgccatcactccctgtaatagtctggaaacaattgcataaagaaaacacagttaacgccaattccccagcaaagaagtttcgagaggcaggcttttcacctatagaaaccagcatgtgtgtggaggagaagcagtatcccccgctggggacagcattaattcatggggctgatatgacacacatgcaggtaaaaagtgcatttagtttattgggaaaaaaggaaaggtggaagatgtagttataatctctaaaataaataacactaaaattgatttcttaggagaacagttttctttttatgtgtgtggtagtttgaataggaatggccttcatagactcacgtgtgtgaatgctcagcacatagggagtggcactattcagagatatgtgacctgattggaggaagtgtgccctgtggaggcagattatgagggatcatttgctcagattatgcccagtgtagcattcagtcttctactgctgcctgtagatcaagatggagacctctcagctccttcttcagcaccatgtctgcctgcacactgctatgcttcctgccatgatgataagggactaaacctctaaactgtaagccagccccagttaaatatcttcttttataagtgttgccatggctatgttgtgtctacatagcattaaaaccctaagacaatgtataaagcatacatatatataaggcaacatctaaaacaatacatgggaaaattgtgttactaatattccaaggaggcaatcaggcaaataaataaataaataaataaataaatagctccttagtgggtgataacaacagcaaaaatacaacaattggaaaataataggttaggtgaaaaactatactttttaaaatgtcttagttcagtttcagagagagagagagagagagagagagagagagagagagcgagagagcacatgtgcatttgtgtgtatatgtatatctttttttccttgaaaatgtcttaagtgaccaaaactatgttacatggcttttggtatattgattttcacttgaatatcagatatgcagataaataaagaaagaaaaagagagcttttatctggctacctggaatttataatcattaacactagatgctttgcaggtacttgtaaatgtcttatatctagtttgcgttgttgtgattttgtagtgactgttaacttagtgttctgagggggtaaatggccactgatcctgcatctgactgtggtaaagtggagcatgtgtgaagaggttttcaaatttatctctaaggtaactatctcgtcctacatgctttacttgagtatgttttagctatatcttttctagacaccctctttttattaagtgtgtagtgtgggctggcttattagccaaagactttcccacccaagcacatggctaaacgtactgaacattctcttcactggttgactctgcccaccccagttttgattttgctgcatcgctgtctgaactttaaagcattatctttgcctgccaggatgtcactccctgcagagaagtcctttgagaacattttctcccatgaatttaaggactgcaaagcaaggccaaatggatgcctagatggaaggtgtcttcttcggatgtgtctctaatgtgtgtgtcatctgtgtcactgactttgatgcatacagtggaaggcggtagcacatattatattgatgatattcttagctatacacctacggacatatatttagtgtcacagatcaaatgactcaaaaaatatttagaaaaaaatggaaacatttccataataaatctaaaatatgtctcatttaaaaacaaaatatataaaccatcaacagcaaaatgaaacacaaacacacacacacacacacacacacaagcatacacatatgtacaagtacacacatatgtacacacacatacatctacaagtacacacacacacacacacacatttgggttcagggaattacaattagagatacagttttatataaagcccagaattgatatttctagaaatacagtgtaagaagagctacagtgaacaaaagacagagaaagaattatgaacatgtctagaaacaccacctgtaacttcttgacacatagcaaagtcacagggtatggtggtttaaataagagtggcctccatacgttcatatatctggatgctggatccccagttagttgaactgtttgggatggattaagaagtgtgctcttgttggaagaagtgtgttgctgagggtgggaatagaggcttttgaaagtctatgcctggtctagtctctagactgaggtctctctctctctctctctccctctcatttctttctctctggatgctacctgctgatcaggatgcaaacatctcagctactgctccagcatcatgcctgtctgctttctgctttaatggtcttagactaaccccctagatttgtaggcaagcccccaattaaataatttcttttgtaggagttgccttgatcatggtgtcttttcacaacactagaatagtaactattttcactagactggttaagcattgaggccccaggatctacctatctctgcctcctattacctgggttatagaccaagaatgccatgcccagttcttggtggatgttggttatccttcctcatgtcctcatgcttagcaacaagcactttaccaactgagccagggacgatgtcttccacacttagtttagtgagcttcaatttttgccttagtttttagtattatgaaaataaatggtacagacacgcatatatttatgcacacacacacgcacgcacgcgcatacgccaaaatagagtcacccacactagagttcaggacattgatcctatacatttccaacaagtttaaaaggatgagagacaaattattcagcagcatttgaattagtatgataaactccctccatctttaagaggaggactctgcagaagaggaagcagagtgtaggagccagagtggatgaaggacatcatgaaaataaggacctctaaatcaactgagcaaagctcatacgtgcattcaaaaagactgaacagcaagcatgagatctacatgggtttgcaccacgtcctctgcagagatattagagctttcagtttagcattttttatggtaatcgtgagtgtgtgaaagggtatttctgattcttgtaatgtctcctggtctctgtctcttttccttgttttgcattgcgttttccagtttcagtgtgataggttttctttaccttattgtactttattttgccatgtttggatgttagttcttagaagcctgttgttttataatgagagagaaagggagtgggtatcgatgggaggggagatgggggtagagcagggaggcagaaagaaggaaaactgccatcaagatattgtatgagaaagaggacctgtttttaataaaattggcgggtgtgacctaaagtaaggtgacagtaaccagaaagttgtgttgttcttgttctgtggcactgcccttgccctgaggaaagggaacctttcagacgcctgacctctttcctttcctttgtctctgctctctctttcggtaaaaccaaggcactgaagcccagctccccagaacactttttctctctaagaagggagatgctccttgattctgagtttgtcttttttgatgttgttttacttgcaatctgggcattcactctaggcccgtctacatgctaggtacatgcacttcagcacagtgtcaccctagacctatggctcaattcttaagttagagaataaagtcagttaaaaccttctttgggaaagggatgcagaagggtcattttataatgataaagaagaatgtttactcagaagacccaacagtctccaattttaggggttgattgtaccaaggattgtcatgaagtcagaaaaggattccatctcttacccaagcaggaaatatttatctctgagtccagttactttcacagttacaaagaattttggtctctgatacctgcctgtgaggccaagaaagggaatgagtgagttctaaaggaattaggtcagcagatagcctagctcagagctagcccagcgtgtgggaagccttgtgttccatcactgtgtataggagaaggtgagggaccttagtgtctgctaagccttggtgaggtgaagaggaaggtgtaatctacagatatgggtgttctgacagagtgagagtcctatctaagtcttagtgaagggtggcttggttttgttattgtttttttttttttttttcattcagcaatgtagcagaattcaaaggtataggagaagagataggcagaattgcctttgggcttcaggcttgatttttgttgttttgaaatattaactctctttattgagggcagggtccaggcatcctcaatgcaatgaatatttgtttagtcttagaggaattctcttaaaccccgactaccacctttctgatttcctcattaaaaaattaaattgtgatactttatatttgtgagggtgtagtttccttaccttaaaaattattatttgatatgtttggaatctagggtgattaatataaaatgaacccataccttacacctattaaccagaatcagattaataagagagaatagcaatgcatttaatgtaaattttatatgatataggaggtgtgagaaataaaggcctgagaaaatataaaaggctgtgtagtataataagtgagatgaagtgcatggttgaggagaaacggaaattgtagctagaagagtctgatcatatgccagccaatggggtggggttagctcagagggtggtcatgttcttccatgccacagtgtccacaggcagaagagcattcctccaactcgggttaagtggggcttctctggaggagttacgaccttctgcagtggaagattaagagatctttcatggtgtgctctctaggaggggagctggagaccagggtgcttcccaggtctgctgttgctcgaatgtcaagattctttattttggggtgccctgtctcaaacaccaccattacctcacatactgagaaggtatattaataaagtcaacctacctattaaatttctcttacatttagtttttcatgctgctcatctttatatgggaaagactttggcttgaagtgagtggttcttcactattttgagggttgctcttatttcactctttaaaaacagagtccctatgagggtgttcctgagggtgctcctccacccactcagtcactcccacctcactgctctagcagctccctatgctggggcatcaaacctccacaagatgaagggcttctcctcttattgatgtcagataaggccatcctctaaaggcagggggagaggacagatgagatggaagggttgtgtgtgggggtaaccagtaagggggacatcatttgaaatataaatgaataaaatggttaatgaaaaatgggaaacaaaacccagaatcccttacacatattttattacaaatgtccacatttggggaactagagtttactaagcaggaactgactgtggcctgtcttgtgcttggttcacatttccctttatgagtatgcttttaccctggtgtcatagacttgacaggatctgacatatatttgtgtcttttgttccctttttcttctttcccccacatatgaaagctgatagaatagataactgttagaattcaccaagattttgaaagtatttgttggcaaaaaacattgagtctagaattgtgtcatcttcttttcagtttcatttgttaaaatttttaatctcacgaatagttaatatgatgagtttcttaacatgtttctcctgacaacactgttagttttataaagagagaaaagtctccagcagtggcaataatccagttagtgaaattttaaaatatctcctcgctctgttctccactagtttctagtagtcatcatattcaactggcacaccctaaagtgtgaaccagcctccataccatcaaagtaccttagatttgggaggcgctttagctaggtgtatacaagaacattaccacccccacactccaagtaatttgcagtagtcaggtgcacacagaatcaaaattggagtattctcagatgtttaaaaatgtttggaagatggctttccttacatgtggtgactgaggaatgctagagtgtggttgtaggctgaggtcattctttctcctatgtactccttggtttacagatgtggttctgctgtatgacagactggtcctacactcacgatcatctccactccacctctgtatgctgggattgcaggtgtgcacagtgatgcttagtctgcatgagtgtgtccgtcccaaggaccaagccttttgctttgagtctcctcagagtctgtctattgccttgaggtttgctcagtcttgacataggaagtttgaccctttgttaatttttttttccttctcagtccagattccagttcacaccaagtattctagcttgtgagattctcatggtaccgtccttggaattggtattgttttgagttaggaaacctagatacttaatgagattctgggcaagttcattgacctctccaagactgtcctctttatacagtaatgtcataataacagcccttagctcctgaagttgctataagaatttagtgggtaataaatgtcagttacttacctggtttctgcatgttttaaggcattccttaaactctatcttgtgtccagggaaatctgaagtagatccaaagccttgcctagacagtcttctaccatgaagctttatccttttaactttgttttagtttgaatttcaaagcttcaatgaagattctatagctttccttaggaccagttataactgcagcattcagcccctctcctatgtcctggcagtattaacaaacaattggaatagtacctgcagctattgagtttactgtctgatgggtgatgggaaggctctctcctctcactctttcctgtttcctgtgcctccattttcagcatcatttccctgaggcagtaattccctctgggttcctacatctgtgacctcaatggtcactcttaaatgatagtttaaaaaaaaaaaaaaaaaccaacacctttcacaactttttctccaatgatgtatagctcaggacataaaatcctaaaatacaattctccaatgttttagaaagtagcaaaagaaagaggtttcagactcagacaccctgtacctaaaggagggcattggatctttattcagaggtaccatcgtggtacttcagggcagggtccaaagacacattccccaggtccttccaggtacattaggtcatactctatctccattacactacctttctcttctgagccaaatgttcaagcatgtacaggtttccctgttctgtccacactccatttctttataaaggagcctgtacttcctaaaatgcatgtaaaattgtggctgcttttctcttgttatcctgtttcctattacagggactttagcctcgaggatgcctatggttaagaagagttttgctgtttctcccacaccactgctggcatttagcatctcacagtatggtcttgagaagcatcatataaatcatggggcactcatggcacgcttttcaggatgctgtatgtcactgaacaatgatgaaggacttattcggcctttgtagtaggctagacactcagtatagaacatattaaagaaaagggtcagtgtgaaaaggtttaggcatgcaaaaggaatattggtgtcatggaaagatatagggaaaagttcttttgttaacatatttttattgactctttgagaatttcacatgtgccccaaaccttctcatttccaagtctacccttaccccttcaaaagaaagtaaaaagatgaaaaagttaacataaaacatacaaacctttccctgagaaagtcctatcaacctttatcaactgcagccttcttctctcacacccgacccagcttccatgtccagttctgctgtgagtgaagcactctgctcctctgtttttcctacctcttggtcacgtagtcattagttgtagaggcactggcagttgtgatgtctcacatacccttttgcccaaacatctttacttgcaaatgttcatttcaaagagtcatttctcatctctgatatctctggcttttcttacatcagtactggatcctcatacatgtgcttgtgcatcctgctgttgccctgagtcctggagatcccatggctttggttctgctgggccagcacctttgcaagctccagcagctcatagatggggtagatgttgggttgggccagctcaaagccatggatctgtaccttggtggtctctgagttggtcagcttgaaagctctcctgtatccatgtcattgaggtcagctcttggcccagacaaggggcagggccaatactaggggagacatcttagccacccctgcattcagatttcaaattgttctgggaaattatagtgcacagtcacatagcaacctctcccaaccacaagttagataagtcacctttctcaaaagttcacttagttataatatttatagtagatttttcacaaaggcccatgctaatatattgtgtgtacataaaatcctgagatatttttaagataacacacaaggcctcaggatatttacagcttgtcacactccaccttccctcttcctttctccattgctttctttctccttcacagaatagatgttaattctctttgcctatgttctttccatggagaagtttgagaactatgaacttaaaatgcatcaaagcttaaagagcaatcacatccttaaataaggtcagaacagaacagaaggtgaaggaggcaaggatagaaaaaatatagttaatggatggcagagcacctccattagagatgcgtttctgagggtttatagtacagtagtgaactgtaatgtacaaccattagttatgcatctccccgtaataggatcagtagagcttgaaggttgcaaacacatgagaatgatattattttgatcaatagaagtagcaattgcctgatgtcatctgtatacattagttaatgataacattacatctcataaacttgtttagatattgtacatcaattgaaaataaaaattaaaggaagaagctggagagcagggtgtataacttcttggacttggtgggaagcctagtggccctacatttagctttgctttagattgggattttgtaaactaagaatataaactacaaaggattcaggaaggaattggttttatctttgtcacccaacaaatgagtggcctggcaccccagtgtgggagaaccactggaggttgtcaagtgagaccatcaggtaagaacccagcttggcctaaacaagtgtcaaaagcatatagcccctgcagggggcactctttcagtcttggtgctgattgtcacttgagtacttgtactttagagtaacactctaaaactcagttagtttaccaatctagaaaggagaaaagagtttttatgcatttcttagtaatgttataaagattaaactgagctacacatccagtgttctgagatgtgtctgacactaaattaatttaagaaagtcataaacaaggtcctttttgtttgcttcttggaggtaaggggcagttgcagttaagtacacatatgtgcaagtgtgtggaggatggaggacaacctttgggtcattccttgggtgccagctaccttttgtttgaaacaacatcactggcctgaaacatgggtgttatcctgggatacctggtcatcagtttgtagggatcacctgtcccttcctctccagtgtggggttcaagcacattgctaattgcccagcttagtttcatgtgggctttggagagtccactcaagtctcaggcttgcaaaccaagacctttgcaaaatgagctctctccgcagccctactgttttcctaacaggttttgtatgtttctgagatgcagcatgatgtctgtcatcaggcagaaggcggagaaggtgttttaatggaacaaactaatgtgacagaaggtactgaatcacagattcaattacttattgattttcattttagaaattaacagtgggactttctaaaaagtaaaaacagtatccagggtccccaggtctttttttgtaaagatgagcatgtaacctctaaacagagtaaaaagatcccagcaactattggtgttcaacattctgaggaaagccacatcctaggtagaaggatgatcaaggaagaaatcaggaaggtgaaatctgttgtctagattaggagaattatagctcaggatgggtaagacaggatgcagtcggttctaactaagattgaaatgctacgtgaaggttctagaatattcgaataacaatcagaggctttagaacaaagactaattagaagatacacatgtgaaataataattttcagtagtaggtaaagtcatgactcatggagatgtacaagccaacctttgttaaaattgtttaattctgaaggagatggtagaggttataactagtctgagaaaattcaaactacaaacttgtttataggctagaaataaagttactttgaaatcatgtgaaagtaaaccagcttttctacagctggatgggaggaacctaaccaagcttcacagtaacaagaagtaatttgtgtgcctaagattcctcatgcctatcagttacctataattatagaataacaaagtgccttaaagacaatgctttgtgtgtgtgtgtgtgtgtgtgtgtgtgtgtgtgtgtgcgcgcgcgcagctagacaagagttatattttagtgtattctcaagaaggtggatgcttgaatggaagggtaaaagtagagaacaattagcgaatcattgatagcttcaccagtcagtggggcaatgtcgaaaggggtgtggctagggcaatgttagcactgaccaaggcagttactgcaaccagacagaatgattaaagtgatcggttggaggaagtagaaattgaaaaaggaactgggtcaggaataacatgcttcatagttgccggccccgggcctttctattttgtgtcaacgagactgttgcttttctccacagtgtgctcatctaccaaagcagcataacaataaaacctctctctcttcagtgtcaggggagcaaaacaaggtgatacatgatcttggtcagtgtggatgtcttaagacagaatgccctaagttaagtaacttaaaaaaaacagaatttatgatcgagttctaaaaggctgcagggccttcagaggaaggtttgagaaagaaaaggtacatttgctgtggccggaggcacccagagagcttcgtgttgatagtatcaaaaccacggggtacaagatacctgatgcttcctcaaaattaaagcaaaagaaagctttaaaacaaaacaaaacaaccaaaccaaaacaaacccccacctgctctgagaatttgctgattcacttattaatggctgacttggctgaggcttcagatgggcaattaggagagctcttaggaaaaatctgagtcaagaaggctgtgaaagggacatgcattgggaaactcagagcgttagattgtcccacacaggtggcaggggtgggtcatttcttcagatccaggcagactttctgtcagaagtcacgaggccatgtgttagaggacaactccgttaataaggtaatgtgtttttattccaagggtcaacctatctcacagacagtatctgagataagccaggcctttaaggtgagcatctcgtatagacccatgtcatttgtcaaccagtgtgtaatggtcacctacagaccacaggttgagttcctagctccccatatattttgttaaatatgatttcacaaacaaaatttcaattggagattaactttgaaaattaggctgttctggctgtctggattctgcacagagtgcctggaagcagccagtgagaggctaagttctccacctctagtctgtgactgctctttctgcctatcagagcttcttgccatgccaggtatcctgggtagaagttcactttacccacacaaaatccctgccacaccctgtgtccatctgcctgccaagcaccactctaacccacagggcctatctaatcatggagttatctctgtgctctgatgcttctgtcctggaataccctctcatgtatccccacatctcctaatactcatctaggtgagctggagttgtctacactttggcaagaactaaaaccaaatgcatcctatcttttaaatgcattcacattatggaaaagttagacaggagaagaaatctcaggaccctttgttcttaacctaaaaatcacaagaaaatgttattataattctgccatctgttcaagtttttaaagccattttggtaaacttaaagctaatgcaaaatacatgccttagcactaattaactgaaaatatctgtttcattcttcttagataatcaaaaaagatgtcaaggacaggatttcttaaggaaaatctaatttgtggcactgaggcctttaaaccacccttgttatatgctcatgagtacagccctaagaataacaagaagtcacatcaaatatctcatcagcaaaatccacacaatacaggctttcgacatttacaactgtaatttagattcctatttccacttaaagattactctgttttctggcagatagaaggtttttgtattgattcttgaggggagaggagtagattggaatggagggctgtggtacatgggaagtatccataaggccaatattgatttcacgtcggagtccaaataccacatgactcctcttgaagcctaactaattgaaattgataccatttgagtatgttcatattacatatcactgggaatggcttttcagactcattctgtcatattctgttacaacaatggcacaaatctgctctcaatggtttgtttgtttgcttggttttctaacccaatactcctggcatttagacttaggccaagtattcttttgaaaacatttccctccccgttcctgtgtgttatcaatataacatgttagcttagaaggacatcattttgcttagaaggccacttaaaatctgcattatttcttcattgtctgctacataaaacatcaagtcttgaggatctttgcctccctactttctagttacatattctagtatccagtgcattatgagctctctgcattatggaaattttattttatttttttcctttaagactctgaatatgcttctcacaggtgtgagttgtcactgtgtggggctcaaatcctcttttctggaatggattagacatcctgccaagacaagggtggcaaataattaatgataacaggcatgtgtgtatgtgtgtgtgtgtatgtgtgtgtatgtgtgtactcacatgtgcgcatttgtgcatgggtgggttagtgtatgtgtgtatacgtgtgtgtgtgtgtgtgtgtgtgtgtgtgtgtgtgtgtgtatgtatgtatgtatatttatgagttgtggtatgtgtgttgtgctgcacaggaaaaatagatgtagcaattgtgcaacactggttgaaggtatgcatgcttttcctgttccatcttataacttactgtgatctcaaactttaagaaaataaataaattagaaaataaagaagtattggagaccagagtcatcccaagggaactttgaacagtgtgtggatccatatgattgggatgtattttagcattggtgactgtcatggattctatgaaggttgtaggaaaggaaaacattgtgtgtgtgtgtgtgtgtgtgtgtgtgtgtgtgcgtgcgcgtgcctgcctatctgtctttctgtctgtctgtctgtctgtctgtctgtctgctttgagaaagggcatactgggtgctatgcgtgctttttgcacagtatttatcttcacggagaaagcttcagacttcccactagttgtaggtatatgccacatgttagagagtttacctgggtcacctgccttttctttattttgggagttcacagaattagggagccatatgacaaagtcagcaactgtgaaacagagagaagtctctgaattctgttcttatttacgtttccccattccatttctaattttgattctctagaagtaattactatcacatacttaagtgtcatagttttagagattattgcaaccaatcagaactctgtgaaaagtcgcaatctctgtctccttgaagacaattccatacacttgttcaaagcagctcttaaccattaggagtggctaaaatgtgtcagctacatactttcttcagtttataataggtattcagagtcccgtaccatcttcctctctaacttttcttgatgttacaatgcccatgaaagacttcattacaaaccaatttgtgtttatcataatcagcctttctggccatatgcatcttaatggctttcaaatgaaaatctggatttgaaagcaaatgtacttattgaaattgcagcatcttgttttctctgctcgtcgtcacatggtcatgactggatatgccatgaggccacagtgtctgtctttgactcacaaacaccatgtctcaggggcagcctggcttctggaatgaagatatccacaactatttcatttctgctctaatgaaactttaaagctttatagagatgaacttgtaaatctatgtagggctccttaggaagtagaagtaaatgctagtagacttcttgaaaacttctgtcttttattccccacattaaggcattaccatcattttggatatttgtataataataggttcctatggtttggctcattattatattgtaccaagtgtcttatacagcatcttatccattagaactattcaaagactattttaggggaacacattaatatgctcctattcaatttttgtcacatagctgatgaatgaattagatcccatgaaaataaacacctggcacatttattatacttgaataaaattctgttcttttgattctatttggttactttttgaatatttcccagacttggtaggaatgttgggagccctggaatcaactcagggtgttcctgccctgtatcaatgtgtgaccacagcaaaatggcttcattagtgtcactgtgtcattgtatgttgcaatagcattgcccaatacgtacttattagaggaagaattagcagggctttagaatccaagccagacatcagtcggcagaaacaggaaggcaaagaagtgtgtgtgccatatagaagaaacgacaaaagtgctgtggactgtcctcagtcggcccctcctcaggagaacttgaaagaacctagtggggaacccccccactaaactcccaattcggtgtgcacccaagaatcatgaacagagcacaacaccttgatgtaacaacacgaggtagtttaatggcagagctccgggtcaaaacgtatatcacacaggagacagtggattcgaccctgagactcaaaaactcagggtttttatagggtagggtttaggggctaggaagaattggtgcggttacacacgattggcccattcaaacatcagcaacatgattatgagtcagcagagtagtacgtgcaggccagggtgtataagaattctaaagccaggggcttctctgagttgacaatgcatctggttaatgttttagcttttagctatgctctctatagaaagggaggtgagcaggaggcaccgggctgccagatggtcattgagtcagccaagataatcagaaccagttcctgcattccttcccttatctttatgaccgggtgacctagcttcaagacagactcaggtgtgcccgggcttgttttctttgcagtttcagtcccaggcctttttagtttaaacctcttattttatttaatttcctttcaaactcagggtcccattacaggtgtgcaggagccgtcgagaaaagggtgacaaacagacacagacacaagggagtgtggtatctgaatgtaatttctcaaagcgagccccagtcttaatatacagaagaaaaacaagaaaactaggggaatacatccaccaaggtacatccataatggttctttttttttttttttttttttttttttttcccaagacagggtttctctgtatagccctggctgtcctggaactcactttgtagaccagactggcctcagaaatctgcctgcctctacctcaggagtgctgggattaaaggtgtgtgccaccaagcccagctttacacaaaacaaagaaaatgtatacataaaaagctagggggagccaggcagtgtttacaactgagataggaacagctctatctaagatcagctaaacacaggagccaggagaatggtctgatgcaaagttagtctattgttaaacccaccaccaggggtcccttagtaaatacctgataatgttgttcttctgggcctagtgaaaaacatgcaccaggggtattccattctactaaccctttcatgaataataattcagttcctcctacaaccacaacctaccttcttcataggccattgtaaattcctgtgcatgtgagtgactcagctattgttctaagtatttactatgtagactagccctgagattacttgctctattcaagtaaactgtaatgcctgatttctttcactgtctcccttacaatactagaagtaattctgaatgttactgaataggtaatattcttactgaattccaagcctagggttggctcaaggactgcctaggactttggaacactggtggaggctaatctaacttatctatatgtcaaaatcaatccttagagacacttataataaaacaatattgaaagaaagcacacagatctatatacctggctaaagtggggacagaaatggagcattcattatacaggatgccatggttccaggtgactaagtttcctgtgaactttttgtctcggactgcgtccaggtttctaggcctgtcacacgagtcactactggcgtggataactagttacctcaaagctggacagagatgagaccactgaagttttctcaaaaaagaaacgcctctactggaaaaaaaaatggagacatgtgagttacctaagctctaaacctgcatagctacctcgatggtatatttcctcagttaaagtacaacacaaaatgtaagctttggggttggaaggatatattctttcaccctgaaattgtctaatcatataataaactattttatattgttgaaacatggtctcactgtatacccatgcctggcctagagctttctatgtagacttgacttttttagatggaagaggcagtggacaatgttttgagtggatggttgcttgcacagagcacgttttcattgatggtggtggttgataggtaagttgtggttatgactctggcagagtaagccaaatcattgaatgagactgttgaattctggtctggcttcttacaggaatgtatcaggcaatactgatgtggagctcacagacctgctttttgtctttgcttataggatggcaccatgttagtagaaatgaatgcaattagattagcttaattaacttgaggtttagttaaccaaaaacgaaggcatttttctctatattaaatgaagcccaaaaggtatggcctcacaaaatctatgtggatgagccacataggaaaaaagcacaagcaagtgatagggttttagtctctaattcctggaaactgattaaaatctctaccactagagtgaaggacataggacaatcatagtgtgccctgtttagatttctattactccctcagaaaacttaatacttttttttttaccaggctctgagtttgaggagggttgggaagctttgaaaatattgtgttgaagcaacttaacttgaaagttgctctccacatccaaattcaatgctcagcaggctgcaaaacctaatctgaagctccagcaagcagtgcccccccatctcaaagaaggtgtcctggagtggtgggtaattgccaagcctaaagaagaaaattgtgataaaagtggaaagaagaaaattacttaattacaacatagttactctagaaatcttctagataaatgggaaaatttagccaagcttttaaatgtcactgtaatttagccccatgccctagaaattctaaattgtaattgaccctaattatataaatacccactggtgagaagagaactgttttccaggaggctgtgctgctgctgaactttgctgacaagtggctcatgacttcagcagatggctcacatgctattggctggggcttccttagaaaccagctttcctctccattcatcagcaaatgataggacaatgctcttggagtgggagggtgggagggaaaatagagaccactaggcattgctccagctatcattatcttgcctgttgatatgttagagtagtcctcctagaaaactatggagaagtggcccattctggctatattagacaatggaatttcttagcttggatcagaaaatggtgttcagttgcattcagcatcatttgagtttcagctaggagtagcatacagatggttcccctgctttttatcctctgcctgtctttctctttctttctttctctgccctctttcctggtaggtcagtaccccaccccaccccatgcataggtgtgtgcatgggtggttctgtttcttttctttccttcatatcgtgcccaatcttcactctccagcaaactcttgtggattgaatgtgatcactctaggtttagaccttactcatttctccattcatatttataagtagagcatctgtcttccatagctggtgaacagaaattctgaatttcctttggctctccattggtttcatgaccattcctgaggcaatcaatatggccagtggagttgtcctgggctggaactgtggctgatccctaaagcccagctgaaagtcagcttaacccagagtatatgaggaagtcactatttccaagagacaagtaaagagaaaatcataaagaatgtgctgaatcctttccaatacgttagttgttttcatgactttttgttaggaaactagagacatatgggaagttttcagaataaaagatgaacaccttgttgaaaaggggaaaaaatccctctactttcttaggatttgtaaagaaaactaaccgtgagaatgtaattgatataaattactatcaattgatataaatagattaatagtagaatatataaaaaagcatttcatatgaattttataacagaaatcccagtcaaggtgataacaccatataaatggaatatacacatatatacatatatgtgtgtgtgtgtgtatatatatatatatatgatacatgatatatatatatatatatgtgtgtgtgtgtgtgtgtgtgtgtgtgtgtgtgtgtgtatacatatgtatgtatattccattagttttatttgttatgttcttgggtgggtttctctgtcatatacaatatatgtatagttcctatatattattcatatgaccagtggagcattgtcctatcatttgctggtgaatggagaagaaagttgttttctaaggaggcctcagcccttagcatgtaagccatctgccgaagtcatgagccacttgtcagcaaagtttagcagtagcacagcctcctggaaaaccgtcaaaaataacattttgacaaaagttatttgtagaaaagctactaagtgggaaaccaaaccaaccaaccaaacaaaccaacaaacaaaagcaacaattacttacgcaaagcatgcttacataaaattctatccttaatatgatagcattggttgtcagcttgacaagatctagaatcacctagaaaacacacctgaagccaggtctgtgatcaagtttctagactgagttgacgtacaaaacatggtcaatgcagggcctccatcccatgctcaggtcctgggctcaatccagaagagaaaggtatccaagctcagtgctcacctctgggtgcttcctgaatatggaagcaccatccctcaccatctcctgccagtgtcttctctgccatgaggaatgatactttcaagttatgagtcaaaggaaacacttgtttaggctgttcttctcagttattttgtcatggagatgagaaatgtaatacacttaaagtttcagtttggttttcttttctggggctagctatatatgcaagtcagtaaagtgcaagcatgagggcttgagttggatccccagcacccatgaaaacaaaatgaaacaggagtcgtttagtacccctgtaataccaaacagagagggagaatttctaggaactaatggcagacagttcagataagggttaccttgcattaaaaaaaatagtaaagtaaaatgtggatcaatagttctcaccctgtaggtcctgattcctttggatcacgaaatatcatgcatataccagatatcccacatatcagatatttacactacaattcataatagtagcaaaattacagttataaagtagcaatgaaataattatatgtttggaggccatcataacattaaattatattgaagggtcacagcattaggaaggttaagagtcactgttctagagggaagagctaccagatgctgaactcttcccggagtgcatacacagatacacacacacacacacacacacacacacacacacacacacacacactttttttcatgcataggaaggacattttctataggggagtttgtttcctgatttccagaaggaaaaattaaatgttcgagtagtcttcttgtcacttttagattttatagaactcatggtatatgaacctgacaccaacctggcatatgaagggatgacatttcccattagctttgccttcacacaaaacaattagattaaataattagtaacattttttagcacccaagtgtcaggctatatcatttttcatacccactcgacagatttttcagagtttcgtcaaatgaagattttgaaatgtacaatacgttagaactcaaaagaaattaaatgtcatttccatggtgctgtgtcctttacctgcctgcctgcttttgttctctttctgaatacagccaagaatcattctatttctcccacaagctgtctcatcttctccaagggaagagggttacatgcagagtagcattgctctagcaaggtaaatgcttcttattccagagagccccagttaatcttatagatgcaattccccaataaggtacaatttctgaattatttattatttcatattagatcaagaatattatttctgaaagtagacttggtgcactctgcaaatctgctttttaaaacattcttctctgaagaatgatccagggatcagaatttgaactcttgggggaccaaactaaaatgtttgagaccttcttcaagttaggtggcttcatatgcagaaaaacaataatggttctagatacagttgtaattctttagacaagtaaaagtttccagtgttaatgagttgaaaatgtagcatcgtcattcacaaagttccagttttttatcttttactcattgcatgccatttggcaaaagataaagaattcctgggtctttgctttgagttaagttgtaataataacaaaaggagttgctgtcacctgagtgcttagtgggaattttcagtgaatggctaactaccatttctcctgtgttacacaggagaaaactgagaaatgagaaaactgaggcacgaggctgggcatcttatgagcaatagcatatgaacatgagtctactcaaagactcagtgcagagccatgtccccaaatttggcatagccacacatttgagagctggaaccatgtggaggtgatcagcagcaactccgggcttactgctataatagaagatgaataacaaaaccactggattttatatgccaaaccattttataatataaaaacttctaaacattaatatctatgagtgtttgtaatgatccttatctttagagaattgtatgggttcacatcaaaatgaaatgcaatttaaaattggtttttgtttgtttttaaagaaatatcctgccttgtccatgcagttttttcctaatgtcaaccctccacttgtcacaataattgtcattaatggaccaaagctgacccatcacaacctcgcagagcacacagttggtatcacaactccttcttgatcctgcatgggtgatggtttggctaaatttggaatgatgtgtattgtagtaacacacaaaagagttccattgccctaaaactcttttctttgacacagaagtacttggatgttgtacattaagttattctcaatttgtaatgcttcatggtgcttcagaaataagggaagtagagctattggtaagtcaagattatacttgagcaaagcaagacagcatagacagtagtacaatatggagagcatgggaataatttgtacatcctaacgcaaactgaagagtaaaccaactcattaagcatcagtaaacataattcagtcaactgtacacaggacatgggctttactcaagctacgactacttggagacagttgctctcattcttagaattcatgatgtaggtcaaatccatgagttttggcactggacagcgatgtggctaatattcaccttgtggctcttagccacctgctctggctaattaaagactctcattttctgctctgctgaccctataatttgcaagtaaaatccacaggacatacaatgtgaatgctaaaacccctttgaagtatttgttactcgtttataaggtaggttatcaacactctcttcccactctctctttggtctctctaagaggactctcatttcctgtctgtcccattgtggaagtagaaaaaaaaatactgaaataatttattttattcattaaagacaagtatttagatattttccaaggagataggttgtcagattacagtgtgatgatcccaaacaagaattgttgctctgcctcatactgctctgcttctcccatttctgcttgttacttacattattatagcttcggtctcctgagtacaaatgcagccaatgtgtttttgtgaaacacacccagattagaccaagttacaaactgagttaatttcacgtatttcagcacaggcaaagtttagaaaataatcatgtcactttttaaggtctaagttactttgtaaaaagagaaattaatgttgctttaattgtatagtttcttttttgtcatttgattttactgtatagcattttaaagtaagtattaatacctatacagttagtttattgtgcaattgtgccataattttcttggtcagattttgttattggtatttatacaagttttccttttattaaaacatttctgcaataaacatctttgcacatgcattgtcacccacatattggggtagtattctaacagaattgactgggatcacgtagtctataccagtttggggaaattgtgtttgatattaacttaccttctttcttctgccacttactttcttctgccacttaacaaagccctttctcccactaaaataccccgtgaaaacaattttttcatgaaattacactgacaattgttgaggagtttgcttaacttggtgtgttcattgccattgtacttgttctggttgaacagtaattatgaacaaggacctgactgctgaccctgaagttcttaagtttgaaaggatctaatgtttttaagggcttttctcacctgtaagcccctggggagatctgggctatcaggttaagctgggtggtggatactaatatatacattaaagaagcttttgtggcattgaaatggaaaattgctaactatgaggatgacattgaggtaaagcagcatttggatgctctacaacataaaatatatttaagtggtgatttattgtgattatttttactgtattaattagttgaagccgggacttcttgaattcattccatagtttcaattcaaggggaatcttactatccatacaggctgtatttctgtcacccaaagtggattagttacagttttttttaccttttaattaaacagctgctactgctaaacacaattctgaattatttaatagtccatattactttactcaattcacattgctttagattttttaattatatgaagatatacattttttatgatatagctctcctaaaaatgagtcgacagacagtaataacttgttcttttgagatgtcaggaatatctttgcatacttaaaaataattatgactaaaattagaaaccagactcatcaaatataagatctttagcttttaaaaaataaatgtaaaatacacacattttaaataaaagttctatttaagacggtgtttgtagttcctgtatcatgtgtggcaaatgctgctatgcaaattcagagcgctgtggagcatccttcatatccaggctgtcattcaggccttcttctgaaattcaccccactacaattttgtggcattttttggcaacagagtctaggcagtgttattcaaaggcagaaatcagtcagtccaaaactatttactgttaatcagcatgaatttgagtgagggcttgtgattatcttgttacattattcggaggtatattcagaagtagtacttaaattcttagttttaataagttttgatgaataattcatccatagaattatcacaaagatgatagatccctagaaactatttttagaaagtagcaattgtataacctttctttctcctttttgttcctgtttgttgtttctttattattgaactgtttcttctgtttctttcccagttttaacagaactcctgtctgcctctctttatacagagatatcataagtgtatatatcagtctggttgacaatcagttctcattgttgttttaccaaatatgatatgacatataataattgcagtattggacactggaacgagcagctgaaaatatgtcagattgtattttaaggctcatcacaacacctgcactgtctgtaaattggtataaccaaaaagccaccttcaatatcttagcttgacagggaccaatatctttaccccaagcctttgaatgaaatgttcttagtggtggaggcaaaggagaacagtgaaaggcctggctgaggttctcagctgtgcaaaccatttaactgagtttagctgatggtaattgtcaggaaatctaaagtaaactattcctatacaagtcctactgattcttgtagaacattacgtagagagtgcatcttgccttgcatgtatgcttggtacctcattatttctctatctcctttcctggcttaagagaaattagcagttaattgatcatagagctaggtggtagaatgaaagtctaagacactgcaaggtgccactcagcattctaacacaggttccatgttcacagcctatggtggtgggcactactcctcaaagtcactcatgcccctacatggcataataccttgtctttggacttgtgatgaattatacattacataagagatgttgactctgtcctctagaggtatagttgcttagaacacttggttgaatttagccaagagagccatttactgagtttaaagttattaaagtcatgcttttaatcttatcctatatttcctgcataggactgcagtaacctttactccctggaaaatgggtttctacagtccttacttacctgttcttgaaacaactagaagtggtatagtagcctacacttctattcccagtttttgggtgacagggacaggaggttaacaattacaaggccagcttttgctacattctaagtttacagcaagattggaaagcattgctagattcttggtctcaaaacaaacttactgtctttttgttgttgttgctgttgtcctgatggacatatgagtttcatgagtatagagatcatgaatgttttgttgttcaactctagtattttttattagatattttcttcatttacatttcaaatgctatcccaaaagacccctatgcccttcccccaccctgctccccaacccacccactcccacttcctggcaatgccattactctgtactagggcatatgatcttcacaagaccaagggcctctcttcttattgatggctgactaggccaaccattcctctgttgaggaacatctgggttctttccagcttctggctattataaataaggctgctataaacatagtgaagcatattttcttattagaagttggaacatcttctgggtatatgcccaggagaggtattgctggatcttccagtagtactatgtccaattttctgaggaatcgccaaactgatttccagagtggttgtaccaacttgcaatcccacaagcaatagaggagtgttcctctttctccacatcctcaccagcatctcctgtcacctgaatttttgaacgtagccattctgactggtgtgaggtggaatctcagggttgttttgatttgcatttccctgataattaaggatgttgaacattttttttttccattttttattaggtatttagctcatttacatttccaatgctataccaaaagtcccccttacccacccacccccactcccctacccacccactccccccctttggccctggcgttcccctgtaccggggcacacaaagtctgcgtgtccaatgggcctctctttccagtgatggccgactaggccatcttttgatacatatgcagctagagtcaagagctcaggggtactggttagttcataatgttgttccacctatagggttgaagatccctttagctccttgggtactttctctagctcctccattgggagccctgtgatccatccattagctgactgtgagcatccacttctgtgtttgctaggccccggcatagtctcacaagagacagctacatctgggtcctttcgataaaatcttgctagtatatgcaatggtgtcagcgtttggatgctgattatggggtggatccctggatatggcagtctctacatggtccatcctttcatctcagctccaaactttgtttctgtaactccttccatgggtgttttgttcccacttctaaggaggggcatagtgtccacacttcagtcttcatttttcttgagtttcatgtgtttaggaaattgtatcttatatcgtgggtatcctaggttttgggctagtatccacttatcagtgagtacatattgtgtgagttcctttgtgattgtattacctcactcaggatgatgctctccaggtccatccatttggctaggaatttcataaattcattctttttaatagctgagtagtactccattgtgtagatgtaccacattttctgtatccattcctctgttgaggggcatctgggttctttccagtttctggctattataaataaggctgctatgaacatagtggagcatgtgtccttcttaccagttggggcttcttctggatatatgcccaggagaggtattgctggatcctccggtagtactatgtccaattttctgaggaaccgccagactgatttccagagtggttgtacaagcctgcaatcccaccaacaatggaggagtgttcctctttctccacatcctcgccagcatctgctgtcacctgaatttttgatcttagccattctcactggtgtgaggtggaatctcagggttgttttgatttgcatttccctgatgattaaggatgttgaacattttttcaggtgcttctctgccattcggtattcctcaggtgagaatttctttgttcagtttctgagccccattttttaagggggttatttgatnnnnnnnnnnnnnnnnnnnnnnnnnnnnnnnnnnnnnnnnnnnnnnnnnnnnnnnnnnnnnnnnnnnnnnnnnnnnnnnnnnnnnnnnnnnnnnnnnnnnnnnnnnnnnnnnnnnnnnnnnnnnnnnnnnnnnnnnnnnnnnnnnnnnnnnnnnnnnnnnnnnnnnnnnnnnnnnnnnnnnnnnnnnnnnnnnnnnnnnnnnnnnnnnnnnnnnnnnnnnnnnnnnnnnnnnnnnnnnnnnnnnnnnnnnnnnnnnnnnnnnnnnnnnnnnnnnnnnnnnnnnnnnnnnnnnnnnnnnnnnnnnnnnnnnnnnnnnnnnnnnnnnnnnnnnnnnnnnnnnnnnnnnnnnnnnnnnnnnnnnnnnnnnnnnnnnnnnnnnnnnnnnnnnnnnnnnnnnnnnnnnnnnnnnnnnnnnnnnnnnnnnnnnnnnnnnnnnnnnnnnnnnnnnnnnnnnnnnnnnnnnnnnnnnnnnnnnnnnnnnnnnnnnnnnnnnnnnnnnnnnnnnnnnnnnnnnnnnnnnnnnnnnnnnnnnnnnnnnnnnnnnnnnnnnnnnnnnnnnnnnnnnnnnnnnnnnnnnnnnnnnnnnnnnnnnnnnnnnnnnnnnnnnnnnnnnnnnnnnnnnnnnnnnnnnnnnnnnnnnnnnnnnnnnnnnnnnnnnnnnnnnnnnnnnnnnnnnnnnnnnnnnnnnnnnnnnnnnnnnnnnnnnnnnnnnnnnnnnnnnnnnnnnnnnnnnnnnnnnnnnnnnnnnnnnnnnnnnnnnnnnnnnnnnnnnnnnnnnnnnnnnnnnnnnnnnnnnnnnnnnnnnnnnnnnnnnnnnnnnnnnnnnnnnnnnnnnnnnnnnnnnnnnnnnnnnnnnnnnnnnnnnnnnnnnnnnnnnnnnnnnnnnnnnnnnnnnnnnnnnnnnnnnnnnnnnnnnnnnnnnnnnnnnnnnnnnnnnnnnnnnnnnnnnnnnnnnnnnnnnnnnnnnnnnnnnnnnnnnnnnnnnnnnnnnnnnnnnnnnnnnnnnnnnnnnnnnnnnnnnnnnnnnnnnnnnnnnnnnnnnnnnnnnnnnnnnnnnnnnnnnnnnnnnnnnnnnnnnnnnnnnnnnnnnnnnnnnnnnnnnnnnnnnnnnnnnnnnnnnnnnnnnnnnnnnnnnnnnnnnnnnnnnnnnnnnnnnnnnnnnnnnnnnnnnnnnnnnnnnnnnnnnnnnnnnnnnnnnnnnnnnnnnnnnnnnnnnnnnnnnnnnnnnnnnnnnnnnnnnnnnnnnnnnnnnnnnnnnnnnnnnnnnnnnnnnnnnnnnnnnnnnnnnnnnnnnnnnnnnnnnnnnnnnnnnnnnnnnnnnnnnnnnnnnnnnnnnnnnnnnnnnnnnnnnnnnnnnnnnnnnnnnnnnnnnnnnnnnnnnnnnnnnnnnnnnnnnnnnnnnnnnnnnnnnnnnnnnnnnnnnnnnnnnnnnnnnnnnnnnnnnnnnnnnnnnnnnnnnnnnnnnnnnnnnnnnnnnnnnnnnnnnnnnnnnnnnnnnnnnnnnnnnnnnnnnnnnnnnnnnnnnnnnnnnnnnnnnnnnnnnnnnnnnnnnnnnnnnnnnnnnnnnnnnnnnnnnnnnnnnnnnnnnnnnnnnnnnnnnnnnnnnnnnnnnnnnnnnnnnnnnnnnnnnnnnnnnnnnnnnnnnnnnnnnnnnnnnnnnnnnnnnnnnnnnnnnnnnnnnnnnnnnnnnnnnnnnnnnnnnnnnnnnnnnnnnnnnnnnnnnnnnnnnnnnnnnnnnnnnnnnnnnnnnnnnnnnnnnnnnnnnnnnnnnnnnnnnnnnnnnnnnnnnnnnnnnnnnnnnnnnnnnnnnnnnnnnnnnnnnnnnnnnnnnnnnnnnnnnnnnnnnnnnnnnnnnnnnnnnnnnnnnnnnnnnnnnnnnnnnnnnnnnnnnnnnnnnnnnnnnnnnnnnnnnnnnnnnnnnnnnnnnnnnnnnnnnnnnnnnnnnnnnnnnnnnnnnnnnnnnnnnnnnnnnnnnnnnnnnnnnnnnnnnnnnnnnnnnnnnnnnnnnnnnnnnnnnnnnnnnnnnnnnnnnnnnnnnnnnnnnnnnnnnnnnnnnnnnnnnnnnnnnnnnnnnnnnnnnnnnnnnnnnnnnnnnnnnnnnnnnnnnnnnnnnnnnnnnnnnnnnnnnnnnnnnnnnnnnnnnnnnnnnnnnnnnnnnnnnnnnnnnnnnnnnnnnnnnnnnnnnnnnnnnnnnnnnnnnnnnnnnnnnnnnnnnnnnnnnnnnnnnnnnnnnnnnnnnnnnnnnnnnnnnnnnnnnnnnnnnnnnnnnnnnnnnnnnnnnnnnnnnnnnnnnnnnnnnnnnnnnnnnnnnnnnnnnnnnnnnnnnnnnnnnnnnnnnnnnnnnnnnnnnnnnnnnnnnnnnnnnnnnnnnnnnnnnnnnnnnnnnnnnnnnnnnnnnnnnnnnnnnnnnnnnnnnnnnnnnnnnnnnnnnnnnnnnnnnnnnnnnnnnnnnnnnnnnnnnnnnnnnnnnnnnnnnnnnnnnnnnnnnnnnnnnnnnnnnnnnnnnnnnnnnnnnnnnnnnnnnnnnnnnnnnnnnnnnnnnnnnnnnnnnnnnnnnnnnnnnnnnnnnnnnnnnnnnnnnnnnnnnnnnnnnnnnnnnnnnnnnnnnnnnnnnnnnnnnnnnnnnnnnnnnnnnnnnnnnnnnnnnnnnnnnnnnnnnnnnnnnnnnnnnnnnnnnnnnnnnnnnnnnnnnnnnnnnnnnnnnnnnnnnnnnnnnnnnnnnnnnnnnnnnnnnnnnnnnnnnnnnnnnnnnnnnnnnnnnnnnnnnnnnnnnnnnnnnnnnnnnnnnnnnnnnnnnnnnnnnnnnnnnnnnnnnnnnnnnnnnnnnnnnnnnnnnnnnnnnnnnnnnnnnnnnnnnnnnnnnnnnnnnnnnnnnnnnnnnnnnnnnnnnnnnnnnnnnnnnnnnnnnnnnnnnnnnnnnnnnnnnnnnnnnnnnnnnnnnnnnnnnnnnnnnnnnnnnnnnnnnnnnnnnnnnnnnnnnnnnnnnnnnnnnnnnnnnnnnnnnnnnnnnnnnnnnnnnnnnnnnnnnnnnnnnnnnnnnnnnnnnnnnnnnnnnnnnnnnnnnnnnnnnnnnnnnnnnnnnncagtctatttggagttctgtaggcttcttgtatgttcatatgcatctcattctttagatttgggaagttttcttcaataattttgttgaagatgtttgctggacctttgagttgaaaatcttccattctcatccactcctattatccgtacgtttggtcttcttattgtgtcctggatttcctggatattttgagttaggatatttttgcattttccattttctttgattgttgtgccgatgttctctatggaatcttctgcacctgagattctctcttccatctcttgtattctgttgctgatgctcaaatctatggttccagatttctttcctagggtttctatctctagtgttgcctcgctttgagttttctttattgtgtctacttccctttttaggtctagtatggttttgttcatttccatcacctgtttgtatgttttttcttctttttctgtaaggacttctacctgtttgattgtgttttcctgtttttctttaaggacttgtaactctttagcagtgttctcctgtatttctttaagtgatttattaaagtccttcttgatgtcctctaccatcatcatgagatatgcttttaaatctaggtctaggttctcaggtgtgttggggttccctggactgggcgaagtgggtgtgctgggttctggtgatggtgagtggtcttggttcctgttagtaagattcctccgtttacctttcgccatctggtaatctctggagttagtagttatagttgactctgtttagagattgttcttctggtgattctgttaccgtctatcagcagacctgggagacagattctctcctctgagtttcagtgctcagagcactctctgctggcaagctctcttacagggaaggtgcgcagatatcttgtatttggacctcctcctggccgaagaagaaggcccaaaacaggacctttctcagacactgtgttgctttggcagttcccaggtggtacagactctcacctaagcagactaaattcctaagttccttggagtcccgggaccaagatggcgaccgctgctgctgtggcttaggtcgcctccccagccgggcgggcacctgttctccggtccggacggtggctggctgtccccggcccacaaagggtgctgcctcagcgcctctgtgcttccgcctgttccagaggctgtcaggttctctggcgcaccctctcacctgttcagactaatttcctaagttcggcgggtcccgatgttgaacattttttcaggtgcttctcagccattcggtatttctcagttgagaattcattgtttagctctgtacaccattttttcatagggttatttggttttctggagtccatcttcttgagttctttgtatctataggatattagtccgctatctcatttagggctggtaaagatcctttcctaatcagttggtggccttcttgtcttattgacagtttcttttgccttacagaagctttgcaattttatgacgtcccatttgtcgattctcaatcttacagcacaagccattgctgttttgtttagaaattttccccctgtgcccatatcttcgaggcttttccctactttctcctctataagtttcagtgtctctggttttatgtggagttccttgatccacttggacttgagctttgtacaaggagataagaatggatcaatttgcattcttctacatgatgaccaccagttgtgccagcaccatttgttgaaaatgctgtctttttccccactgggtggttttagctcccttaaaaagatcaagtgaccataggtgtatgggttcatttctgggtcttcaattctattccattgatctatctgtctgtcgctgtaccagtaccatgcagtttttatcacaattgctctgtagtacagcttgaggtcagtgatggtgatcccaccagaggttctcttattgttgagaagagttttcactatcctaggtttttcgttattccagatgaatttggaaattgccctttataactaggtgaagaattcagttggaatttagatgatgattgcattgaatctatagattactttcagcgatatagccaattttactatattaatcctgccaatccattagcatgggagctctttccatcttctgagatcttcttcagtttatttcttcagacacctgaagttcttatcatacagatatttcacctccttagttagagacacgccaaggtattttatattatttgttaatattgtgaagggtgttgtttccataattcctttgtcagcctgttaatcctttgtgtagagaaaggcctttgatttgtttgaattaattttatatccatctacttcactgaagctatttatcaggtttaggagttctgtggtagaatttttagggccacttatatatactatcatatctcctgaaaatagtgatattttgacttcttcctttctaacttgtatccccttgatctccctttgttgtcgaattgctctgggtaggacttcgagtactatattgagtaggtagggagaaagtaggcagccttgtctagtccctgattttagtgggtttgcttcaagcatctctccatttagtttgatgttggctactggtttgctgtagattgcttttattatgtttaggtatgggctttgaattccagatctttccaagacttttatcatgaatgggtgttagactttgtcaaatgctttctcagaatctaactagatggtcatgtggtttttgtctttgagtttgtttatatactgggttacattgatggattaccatatattgaaccatccctgcatccctggaatgaagcctacatgatcatgacagatgattgttttgatgtgttcttggattcggttagcgagaattttattgagtatttttgcatcgatattcataagggaaattggtctgaagttctctttctttgttgggtctttatgtggtttagttatcagagtaactgtggcttcattgaattaattgggtagagtaccttctgtttctattttgtggaatagtttgcagagaattggagttaggtcttctttgaaggtctgatagaactctgaactaaacccatctggtcctgggcttttttttggctatacatgactgcttctatttctttatgggatatggaacagtttagatcattaatctgatcctgatttaattttggtgcctggtatctgtctctaaatttgtccatttcatgcaggttttccagttttctttccagtatagccttttgtaataggatctgataatgttttgcatttcctcagattctgttgttatgtcttccttttcatttctgactttgttaattaggatactgtccttgtgccctccagttcttctggctaagggtttatctatcttgttgatttttttcaaagaccagctcctggtttagttgattcttttaatagttatatttgtttcaacttggttgagttcagccttgagtttgattatttcctgcagtctactcctcttgggtgaatttggtcccttttgttctagagcttttaggtatcctgtcaggctgctagtgtatgctctcttttttttttttttttttttttttttttttttgggaggctctcagagctatgagttttcctcttaggactgttttcattatgccccgtaagtttgggtatgttgtgggttcattttcattaaacactaaaaagtctttaattcctttcttcatttcttccttgactaaggtatcattgagtagtgttgttcagcttctacgtgaatgtgggatttctattatttatgttgttattgaagatcagccttagtccattgtgatctgataggatgcatgaataatttcaatatttttttatctgttaagacctgtcttgtgaaaaattatatggtcaattttggagaaggtacaatgaaatgctgagaaaaaggtatatccttttgttttaggataaaatgttctgtcgatatctgttaaatccatttgtttcataacttctgttagtttcactgagtctctgtttagtttctgtttccaggatctgtccattgatgggagtgggatgttgaagtctcccactattattgtgtcatgtgcaatgtgtgctttgagctttactatagtttctttaataaatgtggctgcccttgcatttggagcatagatattcagaattgaaagttcatcttggaagattttaactttgatgagtatgaagtgccccttcttgtcatttttgataactttgggttggaagtcaattttattcaatattagaatggctgttccagcttgttttttgagaccattttcttggaaaattgttttctagcctttcactcggaggtagtgtctgtctttttccctgatgtaggtttcctgtaatcaacaaaatgttgggttctgtttgtgtagccagtctgttagtctatatctgtttattggggaatggaatccattgctattaagagatattaaagaaaagaaattgttgcttcctgttttgttgttgttagagttgtgattctgttcttccaactgtcttcttttaggtttgttgagggattactttcttgctttttctagggcgaagtttccatccttgtattggtgttttcccgttattatcctttcaagggctggattcatggaaatatattgtgtgaatttggttttctcatggaatattttggtttctccatctatggtaattgagagtttggctgggtatagtagcctgggctggcatttgtgttctctgagggtctgtataacatctgttcaggatcttctgactttcatagtctctggtgaaaagtctggtgtaattctaatatgtctgcctttatatgttacttgaccttttttccttactgcttttaatattctatctttatttagtgcatttttttctgattattatgtgtcaggaggaatttcttttctggtccattctatttggagttctgtaggcttcttgtatgttcatgggcatctctttctttaggttaggaaatttttcttctataattttgttgaaggtatttactggccctttaatttgaaaatcttcattctcatctatacctattatcctaaggtttggtcttctcattgtgtcctggatttcctggatgttttgagttaggatctttttgccttttgcattttgcattttctttgattgttgtgcccatgttctctatggaatcttctgcacctgagattctctcttccatctcttgtattctgttcctgatacatctatggttcctgattttattcttagagtttctatctccagagttgtctccctttgggttttctttattgtttctacttccatttttagatcttggatggttttgttcaaatccatcacctgtttggttgtgtttttctgtaattctttaagggatttttgtgtttcttctttaagggcttctacctgtttagcagtgttttcctgtaatttttaagagatttttgtgcttcttctttcaggccttttacctaatgtttaggtgtgtcctcctgtatttctctgtgagttattaatgtccttcttaaaaatcctctaccatcacagcagcagcggtcgccatcttggtccgggacccgccgaacttaggaaattagtctgaacaggtgagagggtgcgccagagaacctgacagcctctggaacaggcagaagcacagaggggctgaggcagcaccctgtgtgggccggggacagccagccaccttccggaccggaggacaggtgcccgcccagctggggaggcgacctaagccacagcagcagcggtcgccatcttggtccgggacccgccgaacgtgggaaattggtctgaacaggtgagagggtgcgccagagaacctgacagcttctggaacaggcggaggcacagaggcgctgaggcagcaccctttgtgggccggggacagcaggccaccgtccggaccggaggacaggtgcccgcccggctggggaggcggcctaagccacagcagcagcggtcgccatcttggtcccgggactccaaggaacttaggaatttagtctgcttaggtgagagtctgtaccacctgggaactgccaaagcaacacagtgtctgagaaaggtcctgttttgggccttcttcttcggccaggaggaggtccaaatacaagatatctgcgcaccttccctgtaagagagcttgccagcagagagtgctctgagcactgaaactcagaggagagaatctgtctcccaggtctgctgatagacggtaacagaatcaccagaagaacaatctctaaacagagtcaactataactactaactccagagattaccagatggcgaaaggtaaacggaggaatcttactaacaggaaccaagaccactcaccatcaccagaacccagcacacccacttcgcccagtccagggaaccccaacacacctgagaacctagacctagatttaaaagcatatctcatgatgatggtagaggacatcaagaaggactttaataaatcacttaaagaaatacaggagaacactgctaaagagttacaagtccttaaagaaaaacaggaaaacacaatcaaacaggtagaagtccttacagaaaaagaggaaaaaacatacaaacaggtgatggaaatgaacaaaaccatactagacctaaaaagggaagtagacacaataaagaaaactcaaagcgaggcaacactagagatagaaaccctaggaaagaaatctggaaccatagatttgagcatcagcaacagaatacaagagatggaagagagaatctcaggtgcagaagattccatagagaacattggcacaacaatcaaagaaaatggaaaatgcaaaaagatcctaactcaaaatatccaggaaatccaggacacaataagaagaccaaacgtacggataataggagtggatgagaatgaagattttcaactcaaaggtccagcaaacatcttcaacaaaattattgaagaaaacttcccaaatctaaagaatgagatgcatatgaacatacaagaagcctacagaactccaaatagactggaccagaaaagaaattcctcccgacacataataatcagaacatcaaatgcactaaataaagatagaatactaaaagcagtaagggaaaaaggtcaagtaacatataaaggcaagcctatcagaattacaccagatttttcaccagagactatgaaagccagaagagcctggacagatgttatacagacactaagagaacacaaactgcagcccaggctactatacccagccaaactctcaattatcatagagggagaaaccaaagtattccacgacaaaaccaaattcacgcattatctctccacgaatccagcccttcaaaggataataacagaaaaaaaccaatacaagaacgggaacaatgccctagaaaaaacaagaaggtaatccctcaacaaacctaaaagaagacagccacaagaacagaatgccacctttaacaactaaaataacaggaagcaacaattacttttccttaatatctcttaacatcaatggtctcaactcgccaataaaaagacatagactaacaaactggctacacaaacaagacccaacattttgctgcttacaggaaactcatctcagagaaaaagatagacactacctcagaatgaaaggctggaaaacaattttccaagcaaatggtatgaagaaacaagcaggagtagccatcctaatatctgataagattgacttccaacccaaagtcatcaaaaaagacaaggagggacacttcattctcatcaaaggtaaaatcctccaagaggaactctcaattctgaatatctatgctccaaatacaagagcagccacattcactaaagaaactttagtaaagctcaaagcacacattgcgcctcacacaataatagtgggagacttcaacacaccactttcaccaatggacagatcatggaaacagaaactaaacagggacacactgaaactaacagaagtgatgaaacaaatggatctgacagatatctacagaacattttatcctaaaacaaaaggatataccttcttctcagcacctcatggtaccttctccaaaattgaccacataataggtcacaaatcaggcctcaacagattcaaaaatattgaaattgtcccatgtatcctattcagatcaccatgcactaagggctgatcttcaataacaaaataaataacagaaagccaacatttcacatggaaactgaacaacactcttctcaatgatacccttggtcaaggaaggaataaagaaagaaattaaagactttttagagtttaatgacaatgaagccacaatgtacccaaacctttgggacacaatgaaagcatttctaagagggaaactcatagctatgagtgccttcaagaaaaaacgggagagagcacatactagcagcttgacaacacatctaaaagctctagaaaaaaaggaagcaaattcacccaagaggagtagacggcaggaaataatcaaactcaggggtgaaatcaaccaagtggaaacaagaagaactattcaaagaattaaccaaacgaggagttggttctttgagaaaatcaacaagatagataaacccttagctagactcactaaagggcacagggacaaaatcctaattaacaaaatcagaaatgaaaagggagacataacaacagatcctgaagaaatccaaaacaccatcagatccttctacaaaaggctatactcaacaaaactggaaaacctggacgaaatggacaaatttctggacagataccaggtaccaaagttgaatcaggatcaagttgaccttctaaacagtcccatatcccctaaagaaatagaagcagttattaatagtctcccagccaaaaaaagcccaggaccagacgggtttagtgcagagttctatcagaccttcaaagaagatctaactccagttctgcacaaactttttcacaagatagaagtagaaggtattctacccaactcattttatgaagccactattactctgatacctaaaccacagaaagatccaacaaagatagagaacttcagaccaatttctcttatgaacatcgatgcaaaaattcttaataaaattctcgctaaccgaatccaagaacacattaaagcaatcatccatnnnnnnnnnnnnnnnnnnnnnnnnnnnnnnnnnnnnnnnnnnnnnnnnnnnnnnnnnnnnnnnnnnnnnnnnnnnnnnnnnnnnnnnnnnnnnnnnnnnnnnnnnnnnnnnnnnnnnnnnnnnnnnnnnnnnnnnnnnnnnnnnnnnnnnnnnnnnnnnnnnnnnnnnnnnnnnnnnnnnnnnnnnnnnnnnnnnnnnnnnnnnnnnnnnnnnnnnnnnnnnnnnnnnnnnnnnnnnnnnnnnnnnnnnnnnnnnnnnnnnnnnnnnnnnnnnnnnnnnnnnnnnnnnnnnnnnnnnnnnnnnnnnnnnnnnnnnnnnnnnnnnnnnnnnnnnnnnnnnnnnnnnnnnnnnnnnnnnnnnnnnnnnnnnnnnnnnnnnnnnnnnnnnnnnnnnnnnnnnnnnnnnnnnnnnnnnnnnnnnnnnnnnnnnnnnnnnnnnnnnnnnnnnnnnnnnnnnnnnnnnnnnnnnnnnnnnnnnnnnnnnnnnnnnnnnnnnnnnnnnnnnnnnnnnnnnnnnnnnnnnnnnnnnnnnnnnnnnnnnnnnnnnnnnnnnnnnnnnnnnnnnnnnnnnnnnnnnnnnnnnnnnnnnnnnnnnnnnnnnnnnnnnnnnnnnnnnnnnnnnnnnnnnnnnnnnnnnnnnnnnnnnnnnnnnnnnnnnnnnnnnnnnnnnnnnnnnnnnnnnnnnnnnnnnnnnnnnnnnnnnnnnnnnnnnnnnnnnnnnnnnnnnnnnnnnnnnnnnnnnnnnnnnnnnnnnnnnnnnnnnnnnnnnnnnnnnnnnnnnnnnnnnnnnnnnnnnnnnnnnnnnnnnnnnnnnnnnnnnnnnnnnnnnnnnnnnnnnnnnnnnnnnnnnnnnnnnnnnnnnnnnnnnnnnnnnnnnnnnnnnnnnnnnnnnnnnnnnnnnnnnnnnnnnnnnnnnnnnnnnnnnnnnnnnnnnnnnnnnnnnnnnnnnnnnnnnnnnnnnnnnnnnnnnnnnnnnnnnnnnnnnnnnnnnnnnnnnnnnnnnnnnnnnnnnnnnnnnnnnnnnnnnnnnnnnnnnnnnnnnnnnnnnnnnnnnnnnnnnnnnnnnnnnnnnnnnnnnnnnnnnnnnnnnnnnnnnnnnnnnnnnnnnnnnnnnnnnnnnnnnnnnnnnnnnnnnnnnnnnnnnnnnnnnnnnnnnnnnnnnnnnnnnnnnnnnnnnnnnnnnnnnnnnnnnnnnnnnnnnnnnnnnnnnnnnnnnnnnnnnnnnnnnnnnnnnnnnnnnnnnnnnnnnnnnnnnnnnnnnnnnnnnnnnnnnnnnnnnnnnnnnnnnnnnnnnnnnnnnnnnnnnnnnnnnnnnnnnnnnnnnnnnnnnnnnnnnnnnnnnnnnnnnnnnnnnnnnnnnnnnnnnnnnnnnnnnnnnnnnnnnnnnnnnnnnnnnnnnnnnnnnnnnnnnnnnnnnnnnnnnnnnnnnnnnnnnnnnnnnnnnnnnnnnnnnnnnnnnnnnnnnnnnnnnnnnnnnnnnnnnnnnnnnnnnnnnnnnnnnnnnnnnnnnnnnnnnnnnnnnnnnnnnnnnnnnnnnnnnnnnnnnnnnnnnnnnnnnnnnnnnnnnnnnnnnnnnnnnnnnnnnnnnnnnnnnnnnnnnnnnnnnnnnnnnnnnnnnnnnnnnnnnnnnnnnnnnnnnnnnnnnnnnnnnnnnnnnnnnnnnnnnnnnnnnnnnnnnnnnnnnnnnnnnnnnnnnnnnnnnnnnnnnnnnnnnnnnnnnnnnnnnnnnnnnnnnnnnnnnnnnnnnnnnnnnnnnnnnnnnnnnnnnnnnnnnnnnnnnnnnnnnnnnnnnnnnnnnnnnnnnnnnnnnnnnnnnnnnnnnnnnnnnnnnnnnnnnnnnnnnnnnnnnnnnnnnnnnnnnnnnnnnnnnnnnnnnnnnnnnnnnnnnnnnnnnnnnnnnnnnnnnnnnnnnnnnnnnnnnnnnnnnnnnnnnnnnnnnnnnnnnnnnnnnnnnnnnnnnnnnnnnnnnnnnnnnnnnnnnnnnnnnnnnnnnnnnnnnnnnnnnnnnnnnnnnnnnnnnnnnnnnnnnnnnnnnnnnnnnnnnnnnnnnnnnnnnnnnnnnnnnnnnnnnnnnnnnnnnnnnnnnnnnnnnnnnnnnnnnnnnnnnnnnnnnnnnnnnnnnnnnnnnnnnnnnnnnnnnnnnnnnnnnnnnnnnnnnnnnnnnnnnnnnnnnnnnnnnnnnnnnnnnnnnnnnnnnnnnnnnnnnnnnnnnnnnnnnnnnnnnnnnnnnnnnnnnnnnnnnnnnnnnnnnnnnnnnnnnnnnnnnnnnnnnnnnnnnnnnnnnnnnnnnnnnnnnnnnnnnnnnnnnnnnnnnnnnnnnnnnnnnnnnnnnnnnnnnnnnnnnnnnnnnnnnnnnnnnnnnnnnnnnnnnnnnnnnnnnnnnnnngggggggagtgggtgggtaggggagtgggggtgggtgggtaagggggacttttggtaaagcattggaaatgtaaatgagctaaatacctaataaaaaatggaaaaaaaaaaaatcctctaccatcatcatgagatatgattttaaatctgaatcttgctttttaggtgtattggggggtatgtaggactcactgtggtgggagtgctgggttctgatgatgctgaatggtcttggtttctttagtaagactcttttgtttgcttttcaccatctggtaatctctgaagttagttgttatagctgtctttggctggagcttgttcctcctgtgattctgttagcctctgtcagcactcctgggagtccaagtctgtcctgagtctcagtggtcagagcactctctgcaggcaagctctcctcttacagggaaggtgcacagaggtctggaactcagctctgcctcctgggtgaagatgaaggccctaaagggaccctgaccaagaagctctgttgcttctgcagcctatgtgctctcctgtgcagactgatctctgagggatgcaggatacaggatggtgttctcacctggtcctggggtcagagccatccctggaggccaactctcctctgtcaggggaaagtgaacagaggtctgggtttcagctctgcctcctggctgaagatgaagacccaaagggacccctgtccaagaagctatgttgcttctccagcccacatgctctcctgtgcagactgctctctgggggacccaggatacaagatggcattcttacctggtccccttgttgaattcttgagtggatgacaatataatattcactgggtgcataggattatttcattttccatttttaagaatctaataaataaaggtttgtcattgttaaacaccttgtttttataaagaatgcattctgtctactttcctaactaaacatacctagtaataattgtaatgtgatatttagttgtttttaagatgtgtcttgtgtatgtagcgattgtgtgtgtttgtgtgtgtgtgtgcacatgcacgtgtgcatgctttggtgtgctcatatgtgtgcatgcaagcacagaggccagaagaagaccttgggtatcttctccctcactctcatttttattcagttgatacatggtctcacgctgaacctggcgcttttctggcccaccgactctcctgttttgcctctcactacattgtggttataagcatgttcacatgcatgcctcgcttatgtagttttgtaaccatgcctggcttgtgtatgttcccagtcatgcctggcttagcataatcacagccatttctgacatatatacattcagaaccttgcctggtttatgatgttctaagtcattccagctttttcttttttctttttcttttctttttttttaacatggacactagctatttgaacttattaatttctggttgagtcatctcccatatccctagttggctgctttttaagttcttcttgatcaggacaacattaaagttacttggaagcttaactaaagagtaatagcaaaccatgaaattttgggcaaattttgtaaattgtgtgaatgctttaatggtgttatagtctgagagaataatgatctcaggacagtcttttaataagcactctctatagacaaatccacatttaagcttcctcaatgaaggaatcccatctcccatccccatttctctaggggaaatgttccaggaagtattccaggctcgtccttgacttcagtggtttagacttactctatgtaatgaggtggtataaaggaatacatgcttcctagttctcttaagtccatgtgtgaagaggtatctccatattgaagtcgcctttttaatttcttctttatgaccaaaccctggaatattttaattactagcactcatttgtccccttgagaagaaatgagttatttggtatttgcctgtttctttgaaagcacctatggcctcgggggtcacaggtcacaaacagactttcaagtaaactgtgaaaacatgcctagccttttaatataattttccagctgtttagagcacaagagagtacaccatgttctatttttctgtcttagttttttataaattggcttctctctcaagcattcttcttttatcatcctttgtcctatggtatttgagctgaatagaaatagaactgcactagaaccagagcaaggagctcctccctgcagtgctatgtttgtgttttcctcatgttttctctcattatgcatgcgatgctttcacaaatgcaatagagcacattccttttgaaattaagggtcataatcctgatattgaagtcttcattatctgcactgcatcctgagtagcatatgtttgaggctgatcctctgcttagatgatgggatttaaaggccccagttatcagccactttatgcattttaaattgcaaactgttgcttaattgctgcattactggctcttaataggaagggacagaaatatgaatttgaaacaaaagccatttaatttcttttcattccatccaatcaaatttctgggttttttaattttattttttactaagagcttcagaaagtaacagaacgccttctgtttattggatgcatatttttcccctgctgcagcagataaattatttctcctaaaaaatctaactttgtgaatcagagctagtaattataatgccattttcattgcatactctgatgtcttatttaattcttaatgtgacattgtgactcatctgtttcatatcctgttttaactaaaagaaagtgaggcacagtcatgaggacagtaagagagagtggggaaggcactttgactcgactccttcatagatctgattgcaattcttgagatgaattctaatccattcatctaagtcggtggttctcaacctgtgggttttaaattctttcaggtagaatgacccttttaaagggtcacctcagacccacctaagaccatgaaaaagagaactcctaaagttgataaacaacttcagcaaagtggttggatataaaattatctcaaacaaatcagtagccttcctctactcaaaggataaacaggctgagaaagaaattagggaaacaacacccttcaaaatagtcacaaatattattatataccttggtgtgactctaaccaagcaagagaaataactgtatgataagaacttcaagtctctgaagaaagaaatcttagaagatctcagaagattgaaagagctcccatgctcatggattggcaggattaatatagtaaaaatggctatcttgctgaaagcaatgtacagattcaatgcaatccccatcaaaattccaaatcaattcttcacagagttagaaagagcaatttacaaattcagttggaataacaataaaccaaagatagtgaaaattattctcaacaataaaagaattgtacggaaaatcaccatccctgacctcaagctgtactacagagaaatagtgataaaaactgcatggtattggtataaagacaggcaggaagatcaatgcaatagaattgaagacccagaaatgaacgtacacacataaggtcacttgatctttgacaaacgagctaaaaccatccaatggaaaaaaaagacagcatttttaacaaatagtgttggctcaactgggagtaagcattcagaaaaatacaaaatgatccattcttatctccttgcacaaagctcaagtctaagtggatcaaggatctccacataaaaccagatacactgaaacttacagaagagaaagtggggaaggccttggacacttggtcacaggggaaaaaaacattctagatcagagcaccaatagcttatgctgtaagatgaataactgacaaatgagacttcatataattgtaaagcttctgtatggcaaagtcaatactgtcaatagagctgggcatggtgtggtgcacacctttaatcccagcactcaggaggcagaggcaggtggatttctgaggccagcctggtctacaaagtgagttccaggacaaacagtgctatacagagaaactctgtctcaaaaacccaaaaaaaaaaaaaaaaaaaaaaaaaatactgtcaataggacaaaaaggcaaccaacagattaggaaaagatctttaccaaccctacatccaacagagggctaatatccaatatatacaaagaactcaagaagttagactctagagaaccaaataaccctattaaaaatggggtccagagctaaacaaagaattttcaactgaggactattgaatagccaagaagcacctaacgaaatgttcagcatccttagtcatcagggaaatggagatcaaaacaaccctgagattccactacacaccagtcagaatggctaagatcaaaaactcaggtgacagctggtaaggatatggaggaagatgaacactcttccattgatggtgggattgcaagctggtgcaaccactctggaaatcagtttggcggttcctcagaaaattggacatagtactacttaaagactgagctataccactcctgggcatatacccagaagatgttccaaaatgtaataaggacacatgatccactatgttcatagcagccttctttataatagccaggagctggaacccagatgtccttcaacaggaatggatacagaaaatatggtacatttatgcaatggagtactattctgctattaaaaatgatgatttcatgaaattcttaggcaaatggatagaactagaaaatatcatcctgagtgaggtaactcaatcacaaaagaatacacatggtatgaactcactgataaatggatattagcccaaaagctccaaataactgggatataattcacagattatatgaagctcaataagaggaaagaccagcgtgtgggtactttggtccttcttagaagaacaaaatactgttaggagcaaaagtagagataaaatgttgaggagagcctgaaggaaaggccacccagagactgtcccaactggggactcatcccatataaagttaacaaacccagacactattgtgaatgccaagaagtacatgctaaaaggagcccgatatgactgtttcctgagaggccctgccaaagccttacaattacagagccagatgttcacagccaacatttgactgagcatggagtccccagtagaggagtttgagaaaggactaagtagttaagaggtttgcaaccataggaaaaccaacaatgtcaacctaccagactccccccccccccccccagaactcccagggactaagccagcaacaaaggagtacacatggcttcagtaggatatgtagcagaggacagccttgtcatacatcaatgggaagagaggtccttggtcctatgaaggcttgatagatgcctcagtgtaggtgaatcaagggcagtgaggtgggagtcggtgggtgggggaaggaacaccctcatagaagtagggggagagaggatgcaataggggatttcaggggtgggggacagcaaaggggataacatttgaaatgtaaataaagaaaatatccaataaaaaacttttaaattaaaaaaaaaaggccactggaaaaagcccaaacttatatgttatgatttacaatagtaggaaaattccagttgtgaagtagcaatgaaagtaattaatgattgagggtgactacgcgagtgtgttaaagcgtcacagcattaaggttgagaaccactgatcaaagtctaccagagtctgttttgtgtttccttatctctattgcttttagtctacactcagtcattgaatgggaattgggacccacttcttacattatcttattgtacaagaataaacccctgggaccatcttctatcagacgtactccatctttatgtgcactcacactttggggacatgtgctcattagactctagtggaaatcctggtgactctcaaagcacttaatttgtcatgtttaaaataaaccatcatttctcaatgaagtattagttgttcctttaaatctaagacctcatgaagtataaacaaatgtgtatttcccctttttaaatatgtctctattttaaaacttaaatacatagaagagaaaaacaagtaacaaagactctgggaatagaggctttccaaaaaaaaaaaaaaaatctctcaagtgaatgtgagcttcttttcacaaataaccatgcttgaagtgaaaaggcctaccaaacccatgtgttatacacacttagaaaaatggcagcaatgctcctaatgttttcttcaatttctatggaactctttagaccatattttaggagatagttttaattttctttgaggggttaccattattgaaaagtcacaggaatcagctgcattactaaagcaattgaacttgtcaagactcagccatgaagaatctttctggtgttcatatccagtacttttatttttgctttgtagtataataagggagagaatacaggttggatgaaagagaatggatctggtttttcttccccctccccaccatctcccttcttttccccctcatttcttgtttttgcttttcctgaactttaacatctgtcagccaagaaagggtattgccacattaagggctttcaaatatgacttgaccatccctcctctcagaattatacagaataacatgaaagcaccatcctcaggcagctgacagttctaggttctgcatcacatctgtacaataaagtgtctcaaccctttagttcatggtgttctgcatttgagaaagcatcctttcatttcattatttttcttggtgctaaaacatggcattgttaatagcagaaatatttgaatagtgtgagagataatttgtatttctcttttcagttcagattttggattttagttcttggctagctttcttaagctttcagtaaaattatgagtttatttcctttttttgccaggatagagcatttaaaatatctcgtagtaaagtttgttaagacatcaggggcataattctcatcctcatctcgtttgcatcaattctgttggactttagccactgacatttcatgctagctctggagggaaatgccttttcacagagcacgctgagggtttcagtgaagttcatacgtactgatgtataatgtctaatcttctacttgtccctcccaaactaatctcatttttttttattgtttagttcattttttcaaaataaaaagttagggctaatccatttcattttacatggggtgattaataaactctgaagtatccaagtagagcatgctagttcttaggaagcatgcggtctgtttctgacctgagaacatctctgaggtatatctataaatatctacaaattcgcattggtatacagtcctcactcaacacaaaacatgtatgtagacgtatttgattgaatgtgttttaatatgtaagaaacagcatacaaagattatttcatgacagatggagtgcattaggggagatgctgaaaggcttctgtttggcttggacttggcccgctgagaactatttcacatatgactttataactaaaccaataaagaaggaagtaaaacacacgcaaacatctccattcatgaaggaaagcatttggcaattaaaagcgcataaatatgaactactgcttatataagccacagtagtaaattatttaatgaaaatgcattgtgccagggtacttcaacagcctttcactgttattaacttggaaattgaacagtgcttgagatggagtaggcagaacataaactctattagatacagaatggaaagatacttgtgggagttggtagtagactagaacactaatctgcttcatgcatttcttcttctcttcgttacttctgataggtgttttctgaggagccacttggtgttggccccatgtagccctcggagcactgctacagaacatctcttctttgccatccggcttctcatatggtagatgtcttagctacttttctttctcctcctccctttttaaaaacaaaattatttatttacatttcaaatgttatcccctttcctggtttcccctctgcaaagaccctatgctaccccacccccacccagtgctttgattctatgaggatgctcccccaatcacctactcacttccgcctcactgccctagcattcttctacattggggcatcaaaccttcacaggaccaaaggcctgccctcacattgatgccatatttgctatgttaaaagacctttgtcaaaagcaacttaaaggagaaggggctcatttggcttagcagttcaggaaaagatatagcctatgttgcaggggagacattgcagcaggcaggaagttatgatggcagggatagaaaccagagaatgaacaagtgttccagacagctataaaaattccagacatgccttcagtgatagtcttcttccagcaaagctttactttctagaggccccatagcctctccaaacagcaccaccagctgaaagtgaggtgttcacaagtgagtctgtggaggacatttcatgttggaaacatagtaggtgtgaaaaatgtagaaaatgaattataactcatgttttttttttttttttaggtatttagctcattaacatttccaatgctataccaaaagtcccccatacccacccacccccactcccctaaccgcccacnnnnnnnnnnnnnnnnnnnnnnnnnnnnnnnnnnnnnnnnnnnnnnnnnnnnnnnnnnnnnnnnnnnnnnnnnnnnnnnnnnnnnnnnnnnnnnnnnnnnnnnnnnnnnnnnnnnnnnnnnnnnnnnnnnnnnnnnnnnnnnnnnnnnnnnnnnnnnnnnnnnnnnnnnnnnnnnnnnnnnnnnnnnnnnnnnnnnnnnnnnnnnnnnnnnnnnnnnnnnnnnnnnnnnnnnnnnnnnnnnnnnnnnnnnnnnnnnnnnnnnnnnnnnnnnnnnnnnnnnnnnnnnnnnnnnnnnnnnnnnnnnnnnnnnnnnnnnnnnnnnnnnnnnnnnnnnnnnnnnnnnnnnnnnnnnnnnnnnnnnnnnnnnnnnnnnnnnnnnnnnnnnnnnnnnnnnnnnnnnnnnnnnnnnnnnnnnnnnnnnnnnnnnnnnnnnnnnnnnnnnnnnnnnnnnnnnnnnnnnnnnnnnnnnnnnnnnnnnnnnnnnnnnnnnnnnnnnnnnnnnnnnnnnnnnnnnnnnnnnnnnnnnnnnnnnnnnnnnnnnnnnnnnnnnnnnnnnnnnnnnnnnnnnnnnnnnnnnnnnnnnnnnnnnnnnnnnnnnnnnnnnnnnnnnnnnnnnnnnnnnnnnnnnnnnnnnnnnnnnnnnnnnnnnnnnnnnnnnnnnnnnnnnnnnnnnnnnnnnnnnnnnnnnnnnnnnnnnnnnnnnnnnnnnnnnnnnnnnnnnnnnnnnnnnnnnnnnnnnnnnnnnnnnnnnnnnnnnnnnnnnnnnnnnnnnnnnnnnnnnnnnnnnnnnnnnnnnnnnnnnnnnnnnnnnnnnnnnnnnnnnnnnnnnnnnnnnnnnnnnnnnnnnnnnnnnnnnnnnnnnnnnnnnnnnnnnnnnnnnnnnnnnnnnnnnnnnnnnnnnnnnnnnnnnnnnnnnnnnnnnnnnnnnnnnnnnnnnnnnnnnnnnnnnnnnnnnnnnnnnnnnnnnnnnnnnnnnnnnnnnnnnnnnnnnnnnnnnnnnnnnnnnnnnnnnnnnnnnnnnnnnnnnnnnnnnnnnnnnnnnnnnnnnnnnnnnnnnnnnnnnnnnnnnnnnnnnnnnnnnnnnnnnnnnnnnnnnnnnnnnnnnnnnnnnnnnnnnnnnnnnnnnnnnnnnnnnnnnnnnnnnnnnnnnnnnnnnnnnnnnnnnnnnnnnnnnnnnnnnnnnnnnnnnnnnnnnnnnnnnnnnnnnnnnnnnnnnnnnnnnnnnnnnnnnnnnnnnnnnnnnnnnnnnnnnnnnnnnnnnnnnnnnnnnnnnnnnnnnnnnnnnnnnnnnnnnnnnnnnnnnnnnnnnnnnnnnnnnnnnnnnnnnnnnnnnnnnnnnnnnnnnnnnnnnnnnnnnnnnnnnnnnnnnnnnnnnnnnnnnnnnnnnnnnnnnnnnnnnnnnnnnnnnnnnnnnnnnnnnnnnnnnnnnnnnnnnnnnnnnnnnnnnnnnnnnnnnnnnnnnnnnnnnnnnnnnnnnnnnnnnnnnnnnnnnnnnnnnnnnnnnnnnnnnnnnnnnnnnnnnnnnnnnnnnnnnnnnnnnnnnnnnnnnnnnnnnnnnnnnnnnnnnnnnnnnnnnnnnnnnnnnnnnnnnnnnnnnnnnnnnnnnnnnnnnnnnnnnnnnnnnnnnnnnnnnnnnnnnnnnnnnnnnnnnnnnnnnnnnnnnnnnnnnnnnnnnnnnnnnnnnnnnnnnnnnnnnnnnnnnnnnnnnnnnnnnnnnnnnnnnnnnnnnnnnnnnnnnnnnnnnnnnnnnnnnnnnnnnnnnnnnnnnnnnnnnnnnnnnnnnnnnnnnnnnnnnnnnnnnnnnnnnnnnnnnnnnnnnnnnnnnnnnnnnnnnnnnnnnnnnnnnnnnnnnnnnnnnnnnnnnnnnnnnnnnnnnnnnnnnnnnnnnnnnnnnnnnnnnnnnnnnnnnnnnnnnnnnnnnnnnnnnnnnnnnnnnnnnnnnnnnnnnnnnnnnnnnnnnnnnnnnnnnnnnnnnnnnnnnnnnnnnnnnnnnnnnnnnnnnnnnnnnnnnnnnnnnnnnnnnnnnnnnnnnnnnnnnnnnnnnnnnnnnnnnnnnnnnnnnnnnnnnnnnnnnnnnnnnnnnnnnnnnnnnnnnnnnnnnnnnnnnnnnnnnnnnnnnnnnnnnnnnnnnnnnnnnnnnnnnnnnnnnnnnnnnnnnnnnnnnnnnnnnnnnnnnnnnnnnnnnnnnnnnnnnnnnnnnnnnnnnnnnnnnnnnnnnnnnnnnnnnnnnnnnnnnnnnnnnnnnnnnnnnnnnnnnnnnnnnnnnnnnnnnnnnnnnnnnnnnnnnnnnnnnnnnnnnnnnnnnnnnnnnnnnnnnnnnnnnnnnnnnnnnnnnnnnnnnnnnnnnnnnnnnnnnnnnnnnnnnnnnnnnnnnnnnnnnnnnnnnnnnnnnnnnnnnnnnnnnnnnnnnnnnnnnnnnnnnnnnnnnnnnnnnnnnnnnnnnnnnnnnnnnnnnnnnnnnnnnnnnnnnnnnnnnnnnnnnnnnnnnnnnnnnnnnnnnnnnnnnnnnnnnnnnnnnnnnnnnnnnnnnnnnnnnnnnnnnnnnnnnnnnnnnnnnnnnnnnnnnnnnnnnnnnnnnnnnnnnnnnnnnnnnnnnnnnnnnnnnnnnnnnnnnnnnnnnnnnnnnnnnnnnnnnnnnnnnnnnnnnnnnnnnnnnnnnnnnnnnnnnnnnnnnnnnnnnnnnnnnnnnnnnnnnnnnnnnnnnnnnnnnnnnnnnnnnnnnnnnnnnnnnnnnnnnnnnnnnnnnnnnnnnnnnnnnnnnnnnnnnnnnnnnnnnnnnnnnnnnnnnnnnnnnnnnnnnnnnnnnnnnnnnnnnnnnnnnnnnnnnnnnnnnnnnnnnnnnnnnnnnnnnnnnnnnnnnnnnnnnnnnnnnnnnnnnnnnnnnnnnnnnnnnnnnnnnnnnnnnnnnnnnnnnnnnnnnnnnnnnnnnnnnnnnnnnnnnnnnnnnnnnnnnnnnnnnnnnnnnnnnnnnnnnnnnnnnnnnnnnnnnnnnnnnnnnnnnnnnnnnnnnnnnnnnnnnnnnnnnnnnnnnnnnnnnnnnnnnnnnnnnnnnnnnnnnnnnnnnnnnnnnnnnnnnnnnnnnnnnnnnnnnnnnnnnnnnnnnnnnnnnnnnnnnnnnnnnnnnnnnnnnnnnnnnnnnnnnnnnnnnnnnnnnnnnnnnnnnnnnnnnnnnnnnnnnnnnnnnnnnnnnnnnnnnnnnnnnnnnnnnnnnnnnnnnnnnnnnnnnnnnnnnnnnnnnnnnnnnnnnnnnnnnnnnnnnnnnnnnnnnnnnnnnnnnnnnnnnnnnnnnnnnnnnnnnnnnnnnnnnnnnnnnnnnnnnnnnnnnnnnnnnnnnnnnnnnnnnnnnnnnnnnnnnnnnnnnnnnnnnnnnnnnnnnnnnnnnnnnnnnnnnnnnnnnnnnnnnnnnnnnnnnnnnnnnnnnnnnnnnnnnnnnnnnnnnnnnnnnnnnnnnnnnnnnnnnnnnnnnnnnnnnnnnnnnnnnnnnnnnnnnnnnnnnnnnnnnnnnnnnnnnnnnnnnnnnnnnnnnnnnnnnnnnnnnnnnnnnnnnnnnnnnnnnnnnnnnnnnnnnnnnnnnnnnnnnnnnnnnnnnnnnnnnnnnnnnnnnnnnnnnnnnnnnnnnnnnnnnnnnnnnnnnnnnnnnnnnnnnnnnnnnnnnnnnnnnnnnnnnnnnnnnnnnnnnnnnnnnnnnnnnnnnnnnnnnnnnnnnnnnnnnnnnnnnnnnnnnnnnnnnnnnnnnnnnnnnnnnnnnnnnnnnnnnnnnnnnnnnnnnnnnnnnnnnnnnnnnnnnnnnnnnnnnnnnnnnnnnnnnnnnnnnnnnnnnnnnnnnnnnnnnnnnnnnnnnnnnnnnnnnnnnnnnnnnnnnnnnnnnnnnnnnnnnnnnnnnnnnnnnnnnnnnnnnnnnnnnnnnnnnnnnnnnnnnnnnnnnnnnnnnnnnnnnnnnnnnnnnnnnnnnnnnnnnnnnnnnnnnnnnnnnnnnnnnnnnnnnnnnnnnnnnnnnnnnnnnnnnnnnnnnnnnnnnnnnnnnnnnnnnnnnnnnnnnnnnnnnnnnnnnnnnnnnnnnnnnnnnnnnnnnnnnnnnnnnnnnnnnnnnnnnnnnnnnnnnnnnnnnnnnnnnnnnnnnnnnnnnnnnnnnnnnnnnnnnnnnnnnnnnnnnnnnnnnnnnnnnnnnnnnnnnnnnnnnnnncattgttcccgttcttgtattggtttttttctgttattaacctttgaaggctggattcgtggagagataatgtgagaatttggttttgtcgtggaatactttggtttctccatctatggtaattgagagtttggctgggtatagtagcctgggctggaatttgtgttctcttagtgtctgtataacatctgtccaggctcttctggctttcatagtctctggtgaaaaatctggtgtaattctgataggcttgcctttgtatgttacttgacctttttcccttaccgcttttagtattctatctttatttagtgcatttgatgttctgattattatgtgtcgggaggaatttcttttctggtccagtttatttggagttctgtaggcttcttgtatgttcataggtatctctttctttatatttgggaagttttcttcaataattttgttgaagatgtttgctggtcctttgagttgaaaatcttcattctcatccactcctattatcccgtaggtttggtcttctcattgtgtcctggatttcctggatattttgagttaggatctttttgcattttccattttctttgattgttgtgccgatgttctctatggaatcttctgcacctgagattctctcttccatctcttgtattctgttgctgatgctcaaatctatggttccagatttctttcctagggtttctatctccagtgttgcctcactttgagttttctttattgtttctacttccctttttaggtctagtatggttttgttcatttccatcacctgtttgtatgttttttcctctttttctgtaaggacttctacctgtttgattgtgttttcctgtttttctttaaggacttgtaactctttagcagtgttctcctgtatttctttaagtgatttattaaagtccttcttgatgtcctctaccatcatcatgagatatgcttttaaatctaggtctaggttttcgggtgtgttggggtgccctggactgggcgaagtgggagtgctgggttctgatgatggtgagtggtcttggttcctgttagtaggattcctacgtttacctttcgccatctggtaatctctggagttagtagttatagttgactctgtttagagattgttcttctggtgattctgttaccgtctctcagcagacctgggagacagattctctcctctgagtttcagtgctcagagcactctctgctggcaagctctcttacagggaaggtgcgcagatatcttgtttttggacctcctcctggtcgaagaagaaggcccaaaacagggcctctctcagaagctgtgttgctttggcagttcccagaagctgtcagcttctgtggtgcagactctcgcctgtgcagactaaaatcctaagttccagggagtcctggaaccaagatggtgaccgctgctcctgagtctgaggccgtctccccagccaggcggacacctgtcctctggtccggacggtggccggctgtctgcggcccgccaagggtgctgcctcagcggctctgtgcttccgcccgtcccagaagctgtccggttctctggcgcaccctctaacctgttcagactaatttcctaggtcccgcggagtcccggaacccagatggcgaccgctgctgctgaggctgaggccgcctcccaagccaggcggacacctgtcctctggtccggatggtggccggttgtctgcggcccgcccaggctgctgcctcagcggctctgtgcttctgcccgtcccagaagctgtccggttctctggcgcaccctctaacctgttcagactaatttcctaagttctgctgagtcccggaaccaagatggcgaccgctgctgctgaggctgaggccgcctcccaagccaggcggacacctgtcctctggtccggatggtgctataactcatgttttaaaagcatgagcacactaaggttaaatcatttggaaggatgcgatagacttcataaagagttagttctcagggaacccctgctaacaagatttatgtacaatctgggttttgaaaacaaaacaaaaccttccagtacagaacaagtgtttaagtgtgaggtgaaagagttaccggtctgcagtagagagaggtctgtgttttgagaatgaaagtggacccagggatctaatgagaatgtacaggtgtcttatgttacatgtttctcatacaaagaagttcacactagcaaaactgttagtatgcaattaactgagagacttaggaatttgattttgtttatttgctttcaattcaaatcctacaggctctctgggttttcttttctcttttcatttgttatgcctgccagttggaatcaagctggttgggtaatatactacatatattgcttagtcaaagtaagagtgattgcccccaactcgtgtttgctgggcttcctttatgaaagtagtagcaaactagtccagcatgaccacatataatcctttgatggtatagtgtcagactagttgtgtggaattaatgtggatattacatgtgtacctttattcagtcttttcttcagtgtctcagatccttggaggagcaacaatgtttaagataaagagatgttttctggcagtcatctatgggcttagtactgctaagttttagttgtttgatgaaaaaaagatgggttaagacatgtgaagctcagtaaatgattaggctaacctagttttaggcatatggacagatttacagtaatgtgtcttctgttgatagtcttgctttcttaagagatactagttagaaaagtgactctccttaagtgtagtttgtgtgggtttaatcttgtctgaactgctgttccattgcttgtctggttaaaatcaaaattgtacatcttgctcactaccgctcttggtgctttggggcaataagtattccaataaagggcatatgctaatattcagaaaggtatggatattcagataaaactgtgacacttggatgcaggtggcctccaatgaatgacaccatgccatcattagtaacccagaatcttacagaatgttaaaagctgtcagtcaaggtcccgtcactaaacatttgtgtttctccagaaagggacaatgaagctggctctgaaggtgacatctatacaaaagccaggtactgtaagttttgcctggatctttgagattaagaagagctatctcttcttcacagcctcataggtcaatgggaagagtctgagaaatcaattcttgctgcagccaggaatattggaaaggaaatcaaaactcacttattatgccaggctggtttacagcagctaagagtcttagatatgaattttaaagtctgaggcttagcaacagaatatgcagtaaaatctcttgccagaaatgtagcatcataaacagttgtattctttctgcatgaatcaataatctgacatatttagcatcagaagaatgactacatatgtatgtgttgtggataaggataaattgtggatgggtcaaaagaagaagctattaggtactcattagctgtgttaatatgtgtgagaatttattatgtagtatatattgaattcaaaagaagttcaaagtatttactactcattactactgtgggtgtgtgcatggaagaataatttaaagttctaagacacaatatattgtctgatgataatatgctattcatgaggccttaatcatcagggctaataagaaattaagttactgtattataattggaatgtcacttttattccatgcacaggaagtatgtgatactttggatactaagtctcattatgtcagaccatgtctgtattctgtataggttactgcaagtgacttatttttaacaaatacatgttgaagatataaagtgatttcaagtttcatgaacattgtgaagaaaattaggcaagaaataaaatttattagctggcaataataagtgatgttaaaattcttctcatatgtttattaggcctttttattttatcttttgagaactgtctgctcatttaaaatcatgtgtgtgcatatagcatgaaagtaaaagtaaaattgtctatttgaacaaaggggaataatgagaagcagggagtggaggaagagagcagggaggcaagcaaggaaaagtccctgcatagatttcatagttctaaaaaccttcaaaatcaaactgaaaactgtgcacaaaggtgtggaatgggggaagtgctctctgagcacatgtccaaggaggcactcatattccaaaggaaatgcaaatcatgcaaacataacagaccagaattaagctctctcatttttcctgtgttgggtaataaatatatttccaggggtggaagggtggtcctgtggggactcacctcactcataggcagagtcaaggtattactgttctgaaatatatgccaaaaaaaaatccaataatatctgaaccagccaaggaggcttattttattaagagtttgagtaaatgtcattttctcaagccaaggaagttctgtaagagtagtggcgtgtgtttggggattcctctgaatcaccagtggtcacagctcattgcccaaacccatcttcctaatatatataatgttacatgtggcttaggtcaaaagggaagctgatcttggctatatttcttcattgggttggggaggattctcatttactatgtacctctgagcacttggacattctctcatcactctaactgtgagaatactgagataaagtgctttcttatgtcaatgcattggaaggacttttgattttctttaaattaaatttgattcaattactatgttagataggtagatattcttgctggaggagagggaagatgctcacatttaaagggaggagtagcattgtgtaggaagtgggctgccatggcctctgcaggaacttgcattgaaaacacacttgctttattatgcttattgtttttcatgcattcctttttctcatgctccccagtccccacaatcagtccctttcctcacctgccttctttctttttaacacatcagtggagaaggttaataattggtcatgcgtcccccctcctttttccccacgagtatcatctatggtcacccccatcctttcttctaacattttagctctgaccagagttgagagttaatatatgttattaagattcagataataatttcaaactgaccagtagtcacatctgtggcacatcacgtgtggcttctccccactggccacatgtgtgagcatctcaatctcttcttctatggagttgtctgccaccaccttcctgctgaataacctctcagtgtgattcaacattatgtcttacaaacctaggccagcgttagcatctctacagcaagggggatccagagaaacatggaaatgacttttcttgttattgagatcaatttcaagccaaggctttatcctcttctgctgatggatatgtgtaaaaggagaacaggattcttatcctgtcataaagcctaaataaattaccctcaggtcatttttctgacttactattactgctaattatagtctcaactttttttttttttttttttttactgctttgtggtgttttttctgtttgttttgaagtaaggtctcatcatttattcctggtaggcatggaaattgatatgcaggctaggctggccttcaactcacagagatccacctgtttctgcttcttcaaggctggaatcagagatatgggctgctgtgtctggttctgtggtgtctgattttatgtttctcaggtggctgtgttgaagagaacaagtatggtatacgtgtcttttaacacttaccacagaatttacagtacatcttgggaagtcagcccagactgttgagcctgctcatctccttcaggatttttttttcagctacgggcagcatacaaccttaatgtatgcacatagatactttcttgtatgttgtgtttccttcccctctgtctaggaggtccttgtccattcttacctttgcatctaactttaaaaacaccactctgctcctttgccccagaccatgctctcctgccagccagcactccaccttgttatttcttcatccccgcgggctttaccaagccacagccctgagattgctctcctgccagaaagcgctccacctggttaccacacctggttacctattccctggagctccgtcctttgcccaatcctcccattccaaagcccatcgaattctgccctggctgtgttctttttcttccactccactttaacactgaggatggaaacataagacagccttgatactttaaaactagccagatatctcaatggctgggcaaagactaatcctggcccatcctcctgggtctccattataggtgccctgagaccaacgtgtctgctgctttatcccctccacacccacccctcctctcagcatcctctcattttcctcctgagaccccgaaatcccacctttttcccttctcccagagattgtcttccaccatctttattgacacaatcatgttccaattaggaaaacatctacacctacgtttaccgctttaacctgccaatatttgcagaccaggccaccttggcttttagtcctcttcaggatttccttccttccttcttcccaacagcatctggcccacttcttgaacagctcaccacatctctgttgtctctttccatctttcttcctttgtagaattaaagccttgttacatgtttgcataaaaatataaactaagatggatagaaagagaaatttgaggtttcaatatgaagttaatgtgtcattggataaaatatctttccagaccataatagaataagagagtgaatcaatactcaggccttgcatggatgatcactgcatgctgtataatgtgccttgtggtgtataatgtgccttcattacaggatatcagccctggacgtagttatgaataaaatgttaaaggaaatctcatactgagaaggtttgtcttctttaactaaaggatatttgcaaccattggccttgtcgttctgtaaaaactgagatgtctaaaaacagatacaaagaagagaaagcacaaccttaccatctgcggtgagagtggggcaagggtcagggaggccatatgatgttctgcctatagtagaaacttagaactgaaactaggctgtgaagatagcacacttagtcagatgcttgcttgagaagctagaggccatgaatttgatccttagactccatgtgaacatgttgagcatgatccacactggggagatggggggattcttgaaccttgcccctagatagtctaggctaactggtgagctccaggccaaagagagatgagccatgtttctgaggatgacactgaacacttatgtaaatctgctcctgcacagccatgcacgcacgcgcacacacacacacacacacacacacacacacacacacacacacacgagagagagagagggagagagagagagagagagagagagagagagagagagagagagagatgaaagaatgactattatgtcctggcagcactagtaaaccaggtccttactggctttcttcaaactaaacactaaaggaaaaagaaatgccctgaaggggacaccccagaagatccttggagaagaagcaaagacctgcaggaacagatgttagaacttgaggagagacacccactctcccaagttctcaactgttcttaattatcctctacttttctatcacagagaaatctctcaaacacctgtcatttgcattaatttctcttaagagtccagctgtgactgttccagctgagagactttgtgctgtggaccctcctaacagatgctctggaatcaagaatcatggattcccttctcaagtggatactgttaaccttagtttctacttctgtcaagtgaggaggcttaaaatcagcactactccacaagaaggtctctttgctccttttcatgtgtttgtctggagtatgtgtgtgtgtgtgtgtgtgtgtgtgtgtgtgggtgggtgggtgggtgtgtgtgtggttgtgtgtgtgtgtggtctcaggagatgccttcttggtttttgaagcatgttttttcttgctgctacctaggcttacatgtttgactagcttgcatagccagcaaacattgggggaccatatgagtctacttccctagcattggtcttataagcacatgctggtgtcattgctaggtggtttttctatgcattataaaggtcaaattcagctcttcatgcttgcacaacagtcacattactgactgggacatctgcctaccctcatcatcttttatttagttgtggttttgttgctgtatgttttgtttgattgttgttcttaagaaatatacttcttgtgcctggtatgagaatacatttctttaggcccagcaatgaggaggcagatggatctctgtgagttcaaggccagcctggcctatacagcaagttctaggtcagccatgacttaaaggtgagaccttttttccagaaagataattattgtagtagcaaaaaataatccttattttaaaataatcttagcatgagacccgataggaaagaaacagaagtttgttgcttattaactttaaaaatggagtggttcattttttaagatcgagattgtacaagtcatttaaagatgacaaatcttagatcattcaaatttgccacacaggcatcaagaaagaagagaacatcagcataggtacttagctcaagtttagattcgtgtttatgagaagaatatgctctttggggccagctttttggaagctctggaatacaggaacctcttgcaaaagggtgcctagagagagtgacactctcagggactagcctgtgttttgcaactcaaagtctcctgcttttctccgagactaactagtggagataagaaagcagctagtcactgtaccttggtagagcattggcaggggctttgggagaaagccatggcagcctgtaattatgaaaataaaagtctggtagtctgaaagacagtgatgagattagcaacatataaatcactgaataataaaaaggaaagcttggcttgctttttgcacacccccctccccccaaagcttgttgcttaggaagctggtagggaagtcatctgtgttgacagctttcacattagtaaataaaataactaaataaaagcccctgcgttagcagctcggaggaggaaggtggttgatatgaaacaaagcacaggttgatcatgctttgcaaagaaaactgtatgagcaaagtttaatagagtggaatgaactgtcaggcagatttggatttggatgccactactgccttccacagcctctgaccttgaacaaatagtgtgaaatttgtgtacctgctcccctctcccagagaaagagagctaatacaagctataacctccttctggagaatcagtcatgtactcagcatgggaactctgggtagcaagtgcttcatgagcatcctttgtcccagcggttccttgcagtagcatcctggccaggaagcctctacccctgagacagacagtgtggctcttttcttttaactcactgtttgcccaagtactggaagagatgatttcctatagaaaaatctatgtaaatgtgtatatgtgttttgtagacaaaaattggtacataccaggcacagacatggtacaaactgtaccagggtgatagaagcttccggaatctgtggaagaggaaagaggagcgtttgtttcaccttagttataaggaccaggactcagtattttctggaacatgtttgcagattgagttcacttgcattcctgatggaactgtccaactagcaggttcattttactgtcctgccaggaaaatattttctgagcacttaacaacaatcatgtagatgatgctgtagatgaaattcatcctatgtgtaataaaggagtgatgtgggctgacaccagaagtctgcattgcattctgatgccagccacagctgttgaagtattgtaaactgaatggtggcatgatgtgatctactagtttcctagatatctttggcttctgtgtggagcatggataatggagggtccaggcagaggctactagagttcccttgccatagaggtcttccacagcacagttctgccacaccaagctgctctcttcttcattgttcttttacttgtctacaaccatctgtaggttagaaagtgaactgagtgtactgatgagaagcaaagccacctggaggatgtctctgggctcatttgacaattagttccagaccttggctattagcagtagtgcagcattgtagtgctgataactcttctaagttccctctagacatcttcatatactgagtagtagggttgtgggattacatggtagtagtatttttaattttcagaagaaaatgcacatttttttaataatggctgtgctaattttcatttccaccaacagtaaatcagaaccctgcctttccttttcaaaaatatgtgtcgccctcatccaaactaccactcatcattttcaaatttctatcctagccattctagttggattttagctcctgcagtcttggttaaggtttctcaggttatagggaatgttcaacattttttttgattgatctaaatctatttttttaatattttttattatttcgtattttcctcaattacatttagaatgctatcccaaaagtcccccatatcctccccccacttccctacccacccattcccattttttatgcacctgttgattatagatttaggtttattctgggaatagtctattgagatctttattcagctgttaattggttggtgcattaagtttttctttctatttctttctcttttttttttttgtgattctcttaagttgatttccttatatattctgtatgttagcgccttgccagaggcacagtttacaagcatgttcattacactgtagattctctctttattgtgtcagtgaatagatgaataaaaagagtataatacatgtacacacacacatgcacgtgaataatattcatcatatggtagtgaacagatcatgaacatgagagtgaacatgagagtgcagtatatatataaaggaagacacttcatccataaaaaatgttatttgtggcaatatagctgcacatagaggatattgtatgaaattagccagaagcaaacagagaaatatgaaatgatctcattgctgttatatttaaaatcattaatctcatagacacaaagaataatatagtggtaaccagagaccatagaacttaaggggcagtaggaagagaactcagtgggtcatcagggacaaagctaccgttggagagaacattgctctttgctccattgcacagctgggtgactgtgcctaaaaatagtctgttgaaaatttcacaaacagcaagaagtaaggattttgaaagtttttacactaagaagataacaaatccataataaaatagaaataggaagggtcctcatttcatcatatacatttatccagtcaatacaatcagtatttttatccataaatatctatagtatttgtcaattaaaaacaaaactagggtgaaatacatttaaagataccacttcaactgaaaacagagtgacattattatcaatacaggcagggtacattacaaattctaaggaaactgggtaattatttgaggcattgtggtgctgtaatagcccagggttgttttgttagttcatctttctaataatactctttgactagcaggtggcagccatcaggacagttgctgcgaatatacattaacccacccctacccaaccatacatacaaattgatccagtagtattgaggagttggattttattttagatccagaaaagcatagatctagccacatggaaatggcatctactttggctcttcatttccaatactacaatgagggaaaagtggattccaaatgtatcatgtgtgcttcctcagtctatgatctgccctggaatacaggaggtttttcaggcaatgatccctgaatttgaggaggtcctacactgtccatgcagttagccataacagcatacagaattgcctacataaattctttgtaagggtagaaggaaatgccattactattttttaaaatgtcctttcatgccataaaatctaattatgaatttgtcttagaatgtgtgtgtgtgtgtgtgtgtatacttaagtgattttttaaaaacttaatcgcattacttgggcacccctcactaatttgaaagtggtgaacctgaccctgtaggagagactagcaggctttggaaatgtatggagctcagaagtggaaaagatggtttggctcaagtgtttataaccagttttaacaatttgatttttatattaaatgtccctactatgaattttaagtaatgttttaaaattgtatggaatcaaagacctctactttgccactcatatacatgtatcataatattatatttaatatagtcacctgttgataaaagtttagccgtggaatccatattcatcaatgtcctgattgtaatctttccttaccactttcttactgacataagcttccatagacaaggggttggaagctgttaaccactgaaaagggttttctataactctgagtattgagcaaagaaaggatgggaaattcatgcaaggaattgcaagtcaactgagttattaatgtttaggtgaaacaaacacagctgtggtatgacctgagctgacagctcctctatgtctgtaggaatatacatgcaaagatataactacatggttagatacaaggtcatgaaaaggcatctaagagaaagcctttgaaagtggcaggttcactggattttggaaggtagccaaaagatgatgggaacaaagctctgaggggaaacaattgttttgtttgcctcagactagtgatgggtgtgaagggaccatttatattatgttgcactaatattacatataaaatataacatcataccacatgatcttagagcccctaagtattaattatgtacattaagaaatagttccagggtccttacttaataaaaagttcatatttgacttaggaaggatggaaggtctaaagaactctgtccatcttttgttttttaaatatattgaccttggataggattttctttcggtttatagagactccaaaccctggttatattacaatatatgttaggcaaaaaggatgaactatgtggagggctgtaacagaggcaaagcttttcctgagttagctttcccacagctggtagtctagcaacattactgtttgagactgaaagctactgaagcaccaggaagacttacaaacttaaggtaccaatttgtctcctgttactatgatagaaatacctttgcaaaagcaacttatcagagaaaagaattgtttagcttacatcccaggttataaaagtcatgttaggaacatgaaagatctattcacattgatagtcagaagcacagaaataataaattcatgcatgcctactggcattcagacctctctctatatttattcaacccaggactcaggattccctactcagggagtgatgcccatggtgggctggggtcttcacataccaataattactttaactgagacaatctcctacacacatgcccacagaccaaaccaatttagattctttatccctcaatgaaactttcctcctaggtgaatccctgatagtagaaagttaacaattaaaactaaccattaccccaagacctgccagaaaaacttgtgagaaaattaacacctaaaaaatgggaaggtagacagaaaaacagattcctggagaaaattagataatgattgtaaaggaaagaacaacaaactggaaagaaggatactagatcatgtaaacatattaagaattgagtcagccttggtaaaaatatagttaaaacaagagccttctggtttgtgatcctttgtctttgaagaagctgtaacaaggaatattggaagaatgtaaaacacccataaagtcattacagtctttgtttagaagtggaatatcaaagttatacttatgtgtcatgaacagtgtagaattaatagctcagactttgggttcaaatcctactttctacctcttactctgtggtcagatctacaaaaagttatatatagaagagctcatagtaagtaagggaattgtttcattggttaaaatatggtctgaatttaacacattgtgttgttaaggaagtggaatgtaaaagatgaaaagctcaagcctttaatcccagcacttgggaggcagagtcaggtggatttctgagttcaaggccagcctgttctacagagtgagttccaggacagccagggctacacagagaaaccctgtctcaaaaaaaaaaaaaaaaaaaaaaaaaaaaaaaaaaaaaaagcaaagctcctaaaacactataattgtgttgaggtaatatttatagtaggaacacacaaacatgacctatcttatcattatgaaattacccattaattttttggtaaggacttgggcctaatagcaagaagtttgctttaattaggatttccaagcatctttgcttttaatatttgaggctgtgtgtgcttgtcgttacagatgtcacttgctcaaatgctttcaaaggagaaaactatccctttaaagatgtgaactatgtttgtcatgggaacttgcatttctttatgatctctgtataattactacactgctcctgacctaactgatcttgtaatttgcttagcagtatataaagtgtatttaagttaaattgtaaatgtgtgtttctaaaaggcttaaagttcactgcagtatcgtagtcttccaagggcacagtgcaatttctggtgtatgagtgcataacattttctgtttttacaatcctttactgaaaataaaaagaatgagattgcttatatcattaaatctggtggtatttgccatactagaaattaaatctaggagaatttgaaattgtaaattcatctaaaatagcagcaagctcattttactttaataagatacttttaagtaaaaggaacctatattttcaaaaaatttgagaaaaatggccagtggcattgatatacagtttcaaaaaaaggtttaatgtctaacttagtatgttaattaaatgcagttgtaaaatctgccacaaagaaaaatggcaagatctcaggagagatgcagagggacacccaacatattctatttgattgaggagtaattccctgaggaagtgacacatactaaatcaagatcgcagccatgagcaggcagaggcagactaagagcatagtacaaaacgagagtgtggtggtagtagtatagtgggagttgttggtagcatttaaatagtagaaggaaaacccaggatgactagaaatatgttaaatatattaaggggaggcagacccttgaggctagagatccaggatccagtatatgctcacccaaaactttgaaacatgcatgtggacatgcatttgtgtgtgtgtacatacctgtgtttgtgagtgtgtagacttatacatgcttgagggagggcattaggtattttgatgtatttgtctctacttctctaaggttcctcactgatcttgcagctagctaatctggttggccagcaagtgcctgtcatgctcctgtttccaactcccatagtgctggggttgcaggcataccggttcatgctcagcgtcccccctaccacttgggtaatatgagtagctactcagatcctcttgtttgtacagcacctacagagctttcttcctagcccccacctgttgaattttagtgtgtagtggggggaaggggacataaaagggcatggtcccttttaaacacctgagaaaatacaattctctgtagaaaaacaggttgagagggtatgaaggatagatacaaaaacatttttaaatgtttattgtaggaggatatggaagagatgatacacacttagggatcagtacagcatggagcttggtgattgacaggctatgagccaggagctccagggaagcctccactgagttttcttcagctcacccatcttcatttttcccacatggcttttgtccttcatctagtaaacaaagcatcaaagtagatcatggggcaaaaattctgttgaagctaaggtcttggactttacactcgtattacactcctccccctttatcatttcctatcctggtagaaattctggaagcatgccatcatgtattctatagaatcacagctttttcatgtccagcatcatcttgcaggtagccaggaactaattgtgtttttaaatgcaattattaggagttcgcatgctttgaagcagacattacttgaaagagtacttggttagcaggtgaaactattacaatccttcctcttttattccttttaaattctgagagctgggtactggataacagaggaatctgcccatcacaacagtagctgtcctgagtttccagatgtccgggagtttctgccaggaaaggatgacagctgtttggaatggagaaggagtagagagtactgcaaaacatgtcaagagttttatcaggggagtaagatgacagttggtagcaggaaagggtgaacagacattggaacatgtctggaaaaatcaattttgcttgtggttaggtgatggcttgacattaagaaatactgtgtgttatagaatccagcttttgtctggaataaactatccattcagtcttgttaaagtgcaatctataggactaatagaaggtatatatagcctgatcagtcagtgtgttttaacccagaatttgatagacagtcaatgaagtgggtagttttataagcaactttacctatgcctgtactacatgtagaacactatctactcccagctagaaaaaaagctgtcactattaaaatgatatttagaggtataaaaagggaaaagtgtccttggggctttatcattttattgaaatggtattttagcatgaactcatcagaggaatagcttgactcatcttcaatagaaggaagctctttctactgttgtgataaaacaccatggtgaaaagtaacttagtgagaaagagttgcattctcaagtcacattctatcataggtggaaatcaggacagaagctcaaggcaggaaccgggaggtaggagctgaagcaaggactatggaaaaaatactagcttggccctggtggtttgctcaacctactttcttattcatccaaggaccacctactcctgtgtagcactgcccacagtaggttgagatattctacattagtcattaatcagtagagtgtctcagacacccctacaggtcagtttgatagaagacattttctcagttaaggttctcttttaccaaatgacccaagaatttgccaaactgtcaaaaatcccaaacagaacagaaaaatatttgacccttagaactctgtgtagcctcctagaaggttctatctgaacagattgcacactactttgggtagactagttgttcacattattgcataaattgtcccctgattttgaaatatcttataaacccagcatagcatttggcctcatgggaagctgccagcactcattgtttttggtcatggttctcaactgacatttggaaagcagagtgtttgttgtttctttgcttgttttaaagacagatctttctatgtagatccaggctgtcttaacaagccacctttttccttggctcctaagcagcctaccaagtgccagagttgtaagactgtgttaccagggccacctaagaagtaacatttttattgtcatcttgatttacagtttgtgctgtgtacactatgtgttcattttaatgataggccatatattttcactgtgtgtttatttaccacatcaaggaattaggtcttggaaaatgtcatttaccattagaaaataaatgtattcttagtctaagaattatcttttatcattgtaaaggctttcaatgatctcttaaagatgactgaaaattcagagtcaggtgtgttgtataggaagttcttgaccagtttatgctgacctatgaaacaatattttaaaaaaccataaggaaaggttcttggaaattatatatgaccaaatcagacattgtacatgcattatatataaaattcaaaatagctatgaaggataggctttgtatattgtttatttctgagccatacactgtgaaccacaattttagctattatgttgactaacctcctgcaagcacttaccagcaggtttactggtagctcagcatatacagacatagacttgtcttttgtctccatttgatgtagctggtgattttagaattattcagagctcaagactctccagaattctgtattgatcttaaacacaatttacatgtatgtattcactttaagaattaagctatagcactaatctcttagctaatactttctttgaatagtcacattaagacagagaatgcagtgaggtaagtggagcaccgtattcagatttggatggttctctgttccggacggagttccctttcaggaattacagcacccttctataaaagaaggtgtgtacactgatacatgttgtgtattctttgataatataatttccttttgaaatactaatgtgcaattccttggttttgtttttgtttttgtttttctttactatttatttatgtattacttatttatttgtttttgggacagggtttctgtctgtcctggaactcgcactcaagaccaagctggtctcaaactcagaaacccaactgcctctatctcccgaatgctaggattaaagtagtgtagcaccaggtgatgctaaattcctaaataagaaagagaggatgcaaccagaaacttgggagcaagggggaagacctagaattttctgttcttagttgtctcccatgatcacctcctgaactctagtccagggattgtattaactcatatattcacaaacctggatgataaaatcttttgactgccaactccatcttctctcattagttaacttctttcactgtaactcaaatgccttcagtttataacttaaacaaggaaagaaaaagagacaagctttctactgaaggtatttccaagttgacatgcccttgtctctctgtgctcatgttgctcagagcacgtttcccctactggtttggtaatcataatcagctaatggaatcgagaagggatgtgtttgcaatcagttagaataattccttgatgatgtgtataataaaatatcggctcttatctgtttaatcatgacatgtgtatttaggaagtttaatggtaaaagtatagagaaaaccaaaaatattttcaatggttttgaccttggagggttaataatctcattggaaggatgttgaaatgtatcagtcattagcatataatggaaatttatttattctttagggaatgtagctgagataggcctaacctgtttgcattgagggtagttaagttgacttgaacatttgatttattgaatgattatcctaaagagcagaaccatttcctatgttgagtcagtaaaaatacttccatgagctcttgtatactgaaatgggagagattataaataaaaatgtggatgtggcatttgagagcttcatggaagaatgaatttgggacccaaggccaaagataatgagatagacataactcgattatggaatgagagggaaataggagagaaagagcttggcaggtagatatatgtcttccaaaagggttgcctgccatgctgtctatggaattagtagtcatataagccagtaaatattcttttctttgaggctcctttagtttgcactttcataggcaaccaagtagttgaatagtcaacacaagaaactaaggaagtacacaaagctagcctatggagctcctttcttgctttgctttcacgtaggttagaaacatcacaggctattaaatatatatccacaggacatgaggctgaagggctctagggatcataacagaaaatggctgtgcccccaagagtctccagagaactgtgatctcctgatctcccaggaaattgcgcccaggttgttgtcatattctatttttctgtaagtcttacacatattctcattgctttcatttgaacctgacatctctcctatgaccattcaagtaccattttcttttctacatttttacaggtcataggtgtttttccaaatcaaatacattacactccacatgaacttatcccttctttcaaaattctctagatttgtcttttattctataaaacatatttggttggtttcattggggtactttctcactgtctgccattatgataatgagatgttcttagtttaaaatgttctttgcatttcctagaatggaacttaatattgtatcaagccacatgttttgagcctccatcctgcaatctttcttctggatctaaaataatgtctacaaactgcatgggtaatgttatttatctgcagttgcctttctcattcttggcagtagttacagtatggtttctctgctgcatatccttatgttggatcactaataaagacaagggtatgagtccggtcaggtctgcattgaaactggttttaaagcaaagacaatatgagaatctaaaaccccagctggagagtgaaagatagaagcaaagaacacatttgaggagaatgtgtgacttctcagtgactgcaaggagctagcacctgaagatgtgtgagtaggaagagtgtgagggctggtgagggcaacagcagtctcttcagtccttagaggaagtttgcatatgtaatattttcttcagccagaaattcaatgaaatcatagggattagatacatccctgctcctctcctgcattgtgtgtatgtgtgtgtttgtgtatacatatactttgtatctgtaactacatgtgagtatttgatttacctgtaaattttcctgttttaaagtcttaggaatggacctaatttcatctttctcaatatagcaactcttcatttacctgaacaatgattattgaaactgcatctccttccacccttgacttgaaagtatcatccttctcacattgtgtactgacatgtgtccgttcagtttatttcctgtttttaaagagtaaagacacttcctcagaggatttgttttacagctttctctcattttctttattggctaaaattgggccacccattctactcaaatgtatgcccagaaatggaatagttttccttaatggtttagtgtagtcttggctgtggggcaggtgggtggcttggaattaatgaggaaaaatgtggagaggtttataagaatcacacagagagggagaggttaaaatgaacattttaatggagatgtggtagtttgaatgcctttggctcatgggaaatggcactattaggaggagtagccttgttggagtagatgtggacttagaaaaagtgcatcgctgtggaatgggttttgaagctacatccagtgtggatgaaacctcctgcaagtgtcctgcagaagagccagtcttccccgtaacctttggatcaagatatagaactcttagttcctcaagcaccatgtttgcctccacacagccatacttcctggcctgatgataatgaactcaacctctgaacatgaaagccagcctcaactaaatgtcctttatggttgccttggtcattgtcttagtcagagtctctattcctgaactaaatatcatgaccaaagagcctggggaggaaagggtttattcagctcacacttccacattgctgttcatcaccaaatggagtcaggacaggaactcacagagagtagaaaattggaggcaggagtagatacagaagtcatggaggaatgctgcttactggcttgctttccctggcttgctcagcttgattttttatagaccccaaaactatcagcccagggatggcaccactcacaatgggcccttccaccttgatcactaattgagaaaatgtgttacagttggatctcacagaggcattttctcaaaggaggctcctttctttgatcactgtaacttgtgtcaaattgacacacaaaaccagccactacagtcatcgtgtcttttcaaagcaatggaaactgtaactaagacaggacaatttattcaccttcctttctggacaataagcttctcaaagtcctggagttctcatagattcttatgcttctagccatcagtccatcccctacccagagaaagggtgtatggatttttgtgaaagagaaataagcaggatggtactatatatgttgttttacataaacaaaataaaatgcattaatttttcttcttctttttattgaaagtaactgaaatagtatcctaaaatattcaaagcactaagttcacaagggctgaataatttgagtaaatattttggtgtgaattttgaagtctcatttggaattttaaatattttattcagagtacctttattctgagaatgtcaatacaatcgttaaacatttcttctccctatgacatgggagatggaagcagtaggctgtacattttcttaaagatataattagtgtactctatgtcaccccagtgccacctatttttgtgcctgaaatactgtgaatgttctctttatatttattgaatataatgaatgatatgtctgttttaaagcctgtcataaaaacttagaggtaaatgattctttaatattattcagctggaaaaatcatatataaaacttttgcccacacagcagtccattgccttccatactgattatattcttttatattcttagaaatatactttcatagtctacaaacattgagctatatattaagatacagaactttttaaaaaaatattagtcaatgttttggaaagagacctcttccttaatggtgatggaaaactgtacatattgtatagagaagaaagagcacattcttttctcatgactaatagaaggagctaaacaaggtttgaaagtagccttgtggcctctgtctcaattccttctaatacaaatacttaggattttcaacttcacagccattctagaatagttggatagatatgcactataatatgtaatttcttctttacatttcaattattcaattttaaagaatttcacatatgagtacactatcatatcattttcagctcttcttttttcccaagggtccttcttcatctcaaattattcacttcttttaaaagttgttttaaacacatacacatagagggacgaggggtggagggaagagagagggaaaaagggagagagagagactgagagagaaaaagatatatagagacagagagacagcagccattaattgcttcttcatctagagatggagcctttgtggctgttatagtagatgcttggttctggaaacaaggtctgttactttagcccaggctgttctgaaacccactgtgccattcaggctaggtttcttcctctagcctccttctcttctccctccccctcctcctcctccttcttcttcaacctccttctcccaaggctggggactacaggcataagccagcttgttcttctcagtacgtaattctgaaattaggtttatggtctgggggaagcaatttcagagtatactttactcatctctgacacggcaaaagatgaaaaattgttaggttttgaacacatggtatctcttaataagcttctccaggaaaaatgtgattaagatgtttcctaaggttatagtttttctttggcactctgcatttcctacttttaacacagcatcagtatgacacaccatgcttggctttgtcagcacttctcatacacatattaagtgtaaacacatttaaagtgacagaggtaagtgaatcccaggactataggaagcgctgatgctgtggcaagggtaaagtgtctaataaaatctcctgctaaagagttctcagtcaacctgtgtggttacccagccggcgttcactaggtgcctgcgctttcctcacgtggttcatttttacccactcctgtcattccctgcctgactcatgaaggatatactagtaagacatgacattctaaattgcacatagaattttaatttgtcagggggaataatccagcctctgttttaatatgcccccaccccatctcacccttccagacagcatctagtgtggccacactttgtatttctacccaagtttttctgctctcactgatgccctgaaatgttatatcataaagacccagtttgaagatcattgatcccttgggtttttactggtaagtgatatattgctatattgatcttatacatttttttctggaaatttcttagtatataggaacattttcttatttatataacatttgagacagtgctttgatagatgaggaagtgaatttggactttctccatgggctctaagattttaaaagtagtttccacctcttcagagcccaaattcagcacactcaggccaataattatgtgtggggtgtgatgtgtgcaatgaggggtgtggctgggtatttgtgtgagagggtatcttgacccatgtggatagtcatttgttataactaataagaacgatgtgtatattactgaagaactatttttaaagtaaatatatatgaaattcaagtagaataagagttgtaacttaaactatatatatggggaatgttggctgcaaactaaattagtgaaagtgtaatctgtgctaattctaaaagagaatcctcttttctattgttttacacacaagtgcaaaaagcatgtacttacaggcatgcaagcacatatacacatatccatgcacacccacatgtacacaataaagcatcctattgaaaccttagctgtgtacttaggccattggctagcatttacattcatctggatggactcatggagctgcccacctgctctgcattctttaggtacttatgctaatcatacactcgcccgggcaccacatgatggataagttcattttagtgcagccctgtgccttttacatcttagagagcatagctataatgggttaggcttaatccttatagctctatgtgctttgctaacatgttaaaaacaaaagaagaaacattaggctttgggtaataaatcatggcctactgggacagtcaacttttagctccctttgcacagcagccacttagagaggttgaattctctggcatctggaaaagttctgcagttctttagcttatgcaaaaaggctttgtaggacctgttggattattgtctttttttcatgagtgctagaccttatgagagaggaggggagatgctatgtcctccagcttttaaaaagaggaaaccatgggccagattcatggaggatcatttttaagagtcatttttaatatataaagttttaaaaatcattttgcatgtattgatgatatacattaatgatcggtatgcatatgttatgtgtttgtgtgcctaagtatagacacatgtgtgctatagtatatagtgtgacaggcatgtggggctcccagtacaaggggaggtgtcatttctcatctcccatcttgcttgaggaaggatctctttgctgtccaccattgtgtacatcagacttgctgctgaggatctggagtcctgtgtgtgccagccaccttgcctttgaagcaaaggtcacagctatagcctactacagtcaggctttataaaggttctagggattcaggctcaggccctcatactggcatgacacactgtttacccactgaaatatcatctcagctccaatatagtaagttgtaaaaccaaattttcattgcaatctatgcattagatcataaagtctggatagttatgtacatttccatacatttaaatgtgcacctttcacaattttgggccctttttttttgatttcatttggtgttatctttttccaatcaccctttgaacgacaaaatctagctctgtgttccatatttgctcagctttcctcctctgatagcaatcggcttttgaaaggttcaccccctgtactccaacatttaactttaggcaggtcgttcttctggctggtcacatctggctggaagtaaactactgatctactccagtgtgtcagatttggaaacagtggaagtcttcacctggcaagaagcttcagtagacttcagcatgttaacatgttgttaatatgttgttaatatgttgttaacatgttgttaatatgctcacacacatagatatacaatgtattttcacatatagacctttgggaacattttagtcactgttttataaaaactgaatcttatttattctctcctttttccacaattctttgtggaaacgccttcaaggccatagtgtaactcattattttgaatgacttaaaataaatgtacaatattctccagttgtagttatttcatttctatgcatgtattgtgttttaccactatcaaaaagtttatataattttaatatgagaaaattttaggcattggagtcctaaatttgagaaaatgtactattttatcttaattcatatttctagggtatttcccaaaagctttaagaattcacattttaatttgccacacataacagtacccatttctctactgcctaccaaaagtagatatttccaatttttttagacctggagctctaaggaccaactcttggtttggttcccttctgctaagttggatagtcttttaattccttggtgctctttaactttttaaatttatttttaacatgcctcttcatctttttatgcatttctttctctagtgttggtatttagcgtttacactattgtttgatactttatgcacgttaactttttcatgaccttttattttattttttttttttatgttttgtccaggattcctctctaaccctcactgtcttggaactcagcatatagaccaggctggcctcaaacccatagagatccacatgcctctgcttcctaagtgctgtgattaaaggtgtgtgccaccatgccctgctattttgcaaatgaaatgttgagaccaacttgcctaggaaattctaatctacatgtatgtttatatattccttgtacatctttttgcacataaagacagaggctgagcaggtaggtgggtgtcacgtgcataaatacccaggaataagcatatagaagtacaagcacacttttaaagttactcgcaacaggactgctagttgacaggaaatctttcaatgattaaaatactaaatgttgatatgattgtggggtaacaaagccacctcaggtccttttaaatgtttttgaaggatgtaacccttgtctcctaggagtcattatgggtgacttccatgtccttgccaaaagttattaattttattatcatagcaaatattttttgaatgaaagatattgatggagatgaggtctctcttactataaagaggctggacttttccagttgtattttgtatctcattttttaggttatgatttccctgactctttttaaattttcatttcttgacaccattcttaagtcaaagaatagtgaaacaaaaacaacaactgagcaaacaacaacagcaacaaaagccaaacacagggacatgacatacattacacatggccttctaatgttagggtcttgcatcatataataatagtagtacatatcaaaatcagtaaagagactttacagtgtttactcagactgtgctagtttaaaaggattacatgtgtaggttttggcttattttcaaaactcaagttagaaaaaagttaccagttcttctatctctaaaattaaaattccacattcataagtgaaaatagacaaacaggttatcagaaatccacagcatgggatgatgttgtgaatgtcattctgtgagcaaatttacaggtgtgtgggggacctacaaataggccttgggttgatatgtatcccagaagatttgtaggcaggctaagcttgccacaaatgtctcctttaattacatagaatttaatttattaatttgttgttatataatttgtatattttaatataatttagtattttatttgtcttatttttaaaacaaataatttatattttaaacataatttattaatttagttccatagaattggagacttttggccttctgatgacaatccaatttgttcaactttaagctgcaattttaagaattcatcttctctcattttacaataaaatatacataatggatgtgtgtgtgaaggtttgtttccctaactacagagatacttgctgggttacttggactgtagttttatcacagcatttccataatcaattacaaatccacaatcatgcaaccatagctataatttatgagaaatagctcaccagcttctctgaaccatgtggttacaggctgggacaagtgtgcatctggaagaccatacttccatttttttttctttttaaaaaaaatagggagagagtgagagactttggactggaacactcagccctaagtggttggtcttcatcaaatctcctggattggggatcgatgaagaacaggaagcagaaagattgtaagggatagagctggtgagtgactccagaaagaacatcatccaggtacaacagtactaatgttcagaggaactcacagagactccatcagcacacacaagacctgctcagcttcaagccagatgtggtctgagcacacaggaaaactagatgcgatgtcccacccccaaccaaaaagccacttgtaatcaatacatacagggaaagagaaaatcagttttctacaatggagtgttgctggtatctttccccatgcccaggagtaggtcagcacaaatagcctctttgtttcttgtatgcttgttttatttttggtattgtgttttatttttggtggattttttctcaattgcttatttcattgttttgtttgtttgttttgatttttaaaaaaataatttggtagaggtagaaaagggtgggagaaggaacctgaagatggttggatgggaaggtacggaggatctaggaggaattggaggagggtaaaatatgaccaactatagtgtatagaaaaaacattttttttgttttgatcttgaggcaaggtctctctggctgtcttagaactcactatttgtatgagactagccttaaattcatgggtatccccctgcctttgcctttcaagtgctaggattaaagacatgagacaccatgcctagcccctaaaggtttatttgtatatatatatatatatatatatatatatatatatatatatatatatatatatatatatatatgnnnnnnnnnnnnnnnnnnnnnnnnnnnnnnnnnnnnnnnnnnnnnnnnnnnnnnntccctccctccctccctccctccctccctccctccctttctttccttccttccttccttccttccttccttcctttttctctttcttttctttttctttccttatttatttatttattttatttttaatggttatagatattttaactgcttatatatctgtataccaatgtgtgtatggtaataattgcagagaccagaagaaggtactagataccctaggcttggggttatgattggttctaagtctcacgagggatttgtacctggggcctctagaagaacattcaatgtccttaatggctgaaccatctcttcagatcttttgcttttattggcttacaggagagttttaaaggctcaagtcctcatggtaggccaacttgtcaaaatttagagaatttttctagagcattcattcctcctcaaggctacaaaggaaactgagctgagttgggcctggcttgggtttctgttgagagctgcagtggatgcctaagagagcatcctctgtgctgagtccactgatcctgatcactgtcccttcagaaccaatcttaaggtgggaaatttcaagcatacgcataagtaaccaaagcagcacattctcatttcagtggtgatattcagcatcgctgtgaaaggagaatgttgcttttaaaatgatatacagattatatttttatatttcttccagatagttaatctgaggagaagaaagggattcggggtaggctgtgaaatgacacttccttactggttagctacctgaagcagcatctgtcttttggttctttcacatattattaaagttgatgatgtcacccagaactataaagtcacaaagtggaatacagaatttcgagtaattcttgacatatactatggagctatcggagtggtgtttaagatgcagtaggcaaacaaatggccaataaactgagcaatgaagaaagcagggcatgacagataatgctgactgaataaatgaccaaaccaaaggcaaaataagtttgtgctggaatcaacagtgaagaccagtacataggggttgaatctctttaaggacgataagtcctatgaattcattgtgattccagtcaggtaccatgatctttacagggggaaattattaatctccactggggacaggaactagtctctttatgctatttgtatgttctcaatgcctgaaaatgaatgtacagttacttggatgtatacattgcagagagagagggagggagggaagaagccacaaaggaaggggtagatggacagatgttagctcaaggaatggagcaaggaaaggtatctaagaaactaaaaggaagttagtagccttagcattttaagtggcagtgtattccaaaacctggccatttttaagcagatgccattaggagcaatgcaaaattaaagtaggacattctattcttgtctctggtcacattttagaacccaattaaatgtccagagaccatcttttcttaaaagttagcaaaacgttcctattactgaagagatatactggtgtttactgctctctttaacattctaaccacagatacaagtagaggtaagatctttgtttaaagaaaaaaaatctcatagtttaccaaggtgagctactgtcatggtcccattatgtttaaaacactgcattctgggaatagagttttgacagtgcataccgtattccagtggtaggttccaaagcatagtgaggctaaacatagctccagttaaacatggttgacctggatttgtagaatatatgtctctcataaggcagctatcacacatcagctctaacattgggaagtagctagatttcattcttcattttaagtcagtagtgtgcaatagaaaggaatcaattagcctggtctggttataaagaaaactccccattaacacatcaggaagactccatattctaggccttcatggtcttcacgaggtttttttttttttttttttccttcaggcaaagacactactttctacgccatcccactgtcctgattccttcttcgtctgtgttataaaagaccacttgcattctttggttaattattctatgataacccaaattacgtccagtcttcatcttgtttttctaagtactacaaaccatggtagcaaggaagccaccaagccagaaaggaagaagagaggatagaataaaatggaatgccatgtaagagtgataccctgctcctaagctatgcaatacaactagagtccagtgggcactttcatgtctgtagttatgtctgctatctgcagctccacatacaagagttattgtttctgctctctgcccagagcaggtgtctgggcattctaaacagaaatctcccagagccctttcattattcttctgtgataactttccaaccaccattagaattaaccaggaatgttccacaagttctcagcttaagctaaaacacagtagaaacagaaagaaacaagaaattaaagggaattgccaaggatggttatctctcagagagagagacagagacagagacagagaggcagagagacagagagacagagacagagccagagatatcattctgtgcctttcctatgtcattctctggacagggatggttagcttgccgattcctctattgcttcctactagctgagaacaggtgacattggaacattgcagttcttgaaaatccataaataaatggccacaaaatgattcagtgacccttgagctccatggaaatggtctactaaagtctggttctatcccttgggtagaggaatatgacttatttgtctcacaaatttgaaaaaataaattattacagataggtggtgtcaaaccatcacgagtagttttcctttttcatacttgaatgacactggcatacattatgccctaagtgttcttttcagccttcaggcctggcccattttcccacccaatggaataggaagtcacagtaaggaagacactcttaggcgtgttagctttcagtctttctctgacattctctcaagtttaccacatttatacctgttttaaacaggtataatggtatgccaggatatctctgtaccaggaataacagaatttctctgataaatcttttagaaaagagaatctttccctaaatatactaaaaaggaggagatacattgagctcctgtacttcctcccatccacgaggggaacaatttcatgattttagttttcctggtttaaaatttattgtttaaattttgtttgtttgtatagtagcaatgttactataaattattaatatgctttcatttcttctgagaaaacttgccaccttcccatttgctcagatgcatttctcagcattcctcttcaattaatcctctcataggaagaatttgccataaataccaaaactgagaaattgagacttggctctttggaaaacagccccagaggtagattgcttttcctgggcttttcttccaatctagtgttttgtgaacaggacttggacaaacagtaggaaagacatctctgtcctagtgaacatgcagagcccattatgtgttcagacaagtctttctggaataccagtgaaagaaaattaaatcaactcacgccagctatcttgtatctctcacctgggaaggtatacagactgtaggacaggcgctgcttaacattaatcagcctcctgaagtcattacattcatgaggaaatgtaattcacatgtgattactttttaatttactctgtaatcacattccaagtgaacgggccaagatgaaaatgaaatttaaaagtcaaatactgctttgtattaggaattcacaatttttatatgcacttaggttaataaagattttacaataaccatttgtgactgggcatatgataatttgtggatgaaacgtagtgccgtaccttaggtacgatgtgtttgattcttctccaagtactgacttgggcccagagagcctcagaactgtgctgtgggttgcgttcctgtctcatctaaacattatttgaaaggggtggggagaagcccattcaaacactcctcagtcccagatcagaagttgcaaggagctaatgtatttttgattcctgctgtgcctgtgggccatatccatttgttttatccatcatcagaaagtgtgcacagaactttataataatgcacttcagctcctcggtggggactgccagggcctatagtcagaagcttcccccaacaatgtggcctttgaagtgtatgtagttcctgagttcttaagttggtttcaagggaccactgaaaggaaaggtttagaagttgaagagtggttggttgtgggtgggagagggtacctttgtgctggtttcatcaacatgaactgaaggctacaaagagaaaaatatagagaatcttaaagtttatagtcagcaaaatgaatttttaccatgtggcttttcttgatattggtagaattgcagaagaataaaggtagtctctgaaaaatattaaaaccaaaacaccggatcccattctccagagatactatctcatactattagcacagttatttgctttcagatgtcaagaaatttatggcatatttatgataaagtcaccatgttttattttaagtcaactatctttaaatgttactttggctgtgtagtcagtgctatgtagtagaacagaaaatacaaagctgtcatactgaagaatagaaaattaagcagattattttcttttaattttacataacccaagatacataactttactagcatcagtatgcctgtagtcaacatacatcttattaaattagatctcttatattcatttttgtaatagacctcgaaatcctatgtatattttgtactcaagttatgttccaatgtgtactatccatattgtaggtattgacacagtctgtgtggtttgtggcttctgtgttggtcacaggcattctacactgggacatttatatatttgtgatgtgggcatgctagttatgtattggtttgtaaaatgtaatatgaccatatatcacaatccttgactttttatttgagggaggtagtgataggcatgatggatggtattcaaattgttgtaactctacatggatggatatacttagctacaaattgtctgtgtgtgtgtgtgtgtgtgtgtgtgtgtgtgtgtgtgtatgtttgtcctgtccatgagtacctatataataaacttaaggtaatgatattaagataatattccttgttattaattcttaaaatagcataattactatatatagtatctgtgtactacattgtagatacataacacaatacacacacacataaatatatatatatacacatatgtgtatatatacatacataactgtatagtcactatatagtcaccattttcatacacacatatattttttttatgatttaatcatgcagtgttagctctagtagatgaaggtggcagaaataatgctgctcttacccagaaacacaaaactgaacatctagatctgtgaatgcctcctagccaggcaaaaggaaatttttgtggtataactaagttatgatcttgggattgggagtttgccttagattgctcaggcaggtcataaatattttagcaaacggaagagagaggcaagagaatctaggaagacttggatgatggcagagagccgagtgaagtaagaaggctaagcatgccttactggttttgtgatagagcaaggggccaaagagtgtgggcaaccttcagaagctagataaagcaagtaaatggaatgtctctagtagctctgaggactccagctctactactgtctctcatgttgagtttagtgcagtgagaacttgggacttctatcctttaaaactacaagataaagttttgttattttgaatcactagatctgtggtaaatgattgctttaccaagttactatatatatgcagcctgaatgaccaggtgattcaaaagcgaccacttccagctattagaaaacacatgttctctgacacaaaaactaagtgcatttttccctgaaccacttggctgagggctctcccctctgggttatgcacagtattgttttgccaaccccgtatggagactacaggtagtgtacaggacagcaatcaggtctatgagagtctgcattcccatgactgttacagggccagcatcttacattctcatagacatgctgtggtcagtcaccctaagtatctgactttgtgagtgattatctaaaagattgtgtcctacattgtatgtgttctatgtggtggtttgtgaagatcaagcctagtgtagggttgagcatgactcctttttcctgccttgtctctgctcatgtgcttgaaggctgtatattttctaaaattctctgaaacctatcttggattgatatttggaagctctttaaccaacttgataatgtttgtattttaatttcattttcatttagaaaaaaataatatggagactctgtccttcctctattcaaaatgctatatgtctggggcattctttgcaaggacattgggtctaggctattttgaacagttatgctatatagcattgggctctgccagggctatgtttggtgttttctcaggtggttactgactttcctcttctcactactatatatataggtatagacaaggttattgtatttcctttaaaggatttaacacatcatcagtgttttgttttgttttttccttttttgtatattttggttgttcaactactcatggttgtaaatttaaagactgagaaaaattttatcctcccaccaaacgtatgtggaattcacaattctgcctttcaaggaaaatgtcattcagtgtcatttggaatggatggtttaaaaatcacagaggaagtcatctttgaatggcaacaccagtaatgaacaaacacttcagtggcaacttgtattgtttaaaattacggagttcacacaaaatgtaattacttccaaaaagcttcgtattgactgttgttagagaacgtcaagaccacacacaaatataccattcacactcctcatcattctcctctcataggtgattttgggctatttgggaaaatggcgcccaaagctagaccttgaagaacatggggtgatgtagaggtcctgagtatgtgagtaggcaattagcttgtaggacaatgatgtgaaaaatgtaaccccagtcagtgcccccctggggtaatagaacttggaattctggtttatttgcatgttctgcatgggcttagagccctcgaaacagagatattctctaaatcaatcaaagccagccatttatttgatatctgctgttgctgatggcattgtagggagaaaagttaaatctagaagcctcaagaatattctacatttagctgggcatggtggcggacgcctttaatcccagcactcgggaggcagaggcaggaagatttctgagttcgaggccagcctggtatacaaagtgagttccaggacagccagggctacacagagaaaccctgtctcgaaaaaccaaaaaccaaaacaaaacaaaaccaaaacaaaaaaagaaaacccagaaaaaaaagaatattctacatttgaagaggcaggaatttggaggaaagatgaaaaatcagaagggctagaaacataaattatcgatattatcaaactattggccaggctggtcaatattttggaagcatgtggtccaggcttataatactagtgctagagacacagaggcaggaggatcttgaattcaagatcagtttgggatacataacaagattctgtccccaaatgccagacagaaagtggtaaagcctagatagtcaagaagaaaattatttctgattttcttatccatggtgcttataaaactatgtgttctagtcttccagtttggagtcaagctctgatgatctggtcatttctgccctgctcccatataactattctgctgtgtctgggtagtatactttgagtagcaagaatgaaaatcatgtctaggtgccaacattaaacacagttgttctcaagctagactctgtttcccagggcctcccaacaggacctgaggtcactttggggttgcttctgccagatgctatagaaagatgtgtggaattgtgcttgactgaaagggttttgcagaggaatgcgctgtgttccttttctttacaaccttttttagttacctgtctgctttcaagtattttcccctgtccttaaagacagctttcctgttctcaaaggagtgaaatatatagaaaatggtttagaaaaattgtgggaatcctagtggcaactcaatgcccatgtagggaagggcaatgcctccatactcctaccagccactctggtacctcccttgaacttaccaaagttgttcatataccattagggttgaagaatggtaattaaaggaaagaatcatgggagctggaatccagatctgaatttccatctgaagtataggtagctttctctacactgcttggggacaagctttctcttttctctgttatctcgttatgcttccctttgtatagagtggctgtcccagctctttcctatcctagcaaggaatgcagacaatgccgccccgccccccttcattctgcactgagctccactcagtttgttccatccttgaattttctgtagaggacatggctcatttcaaattctgtagtacccagccagaaaggacaggagaaattatgggatagaacatacctgatacctatttgggacattgggagatatatttgcatgtccacatgaccagcacctgtcactatgctcccctgtctctacccagggatgtggcatgtgttttcttgttttagggattttagctgaatttgtaggtttattttctgtgctttagttttctcatttaatgttatcttgtatttacttactttagcctataataaacgtgtgggttttcacataattggattgtattcgtgctcagtgcaggacatggggaaataaagggggttggggagatgacctgcatcccgccagagctcagggcagatgtggaggttggactgtgtgcgcccccacactgctgagttggtgtctggctgtaggaagccatgggaccccagtcagcagggcggaggggggttagggagggagcagtctaggatgcctgggcttcacggaggccagggacaacaggttctagctcttgggcatcacaggacatcacttgatactgcggaagagctgagaatggatgggcgcctagtcccccctccccagcggtagtaggcccaggctgaagggaaaaaggggtggggaaggcatgggtggtccccaccctggtgagagtccttggtcctgtctagggggtggagaaactggaaggccgcctggtgggaggttagatgtggctctttagggaaaggcatattccattgttccagcatggcaagtctagatgaaaggaggcagtccatggctttaaggtatttattggagagagagagagagagagagagagagagagagagagagagagggagagggagagggagagggagagggagagggagagggagagggagagagagagagagagagagagagagagagagagagagagggagggagagggagggagagagagagagagagagagagagagagagagagagagagagagagagagaggaatagagaagcagaggctagccatggccacgtggagaaaggggagaaggaaatgaggagagaggcagggcaagaggaagagcaagagggtaagagaggcaagagcttgagagaggggggggggcaagtagccccttttatagtaggccaagcctacctgactattcacaggtaactgtggggtggagtatacctggctgtagccaggcaaccgtgggggtggagtccagccagaatactaggaacctggggagttaccctacatgactgatggccacaggattagggagttgaaggcttatggtgtcaagagtctagtgtctgggagcgtagctcaggattctgtaccttgtagaattttctatggggtctctggagtaagccttactcaaccagaatacagactgcctttcacagtccaacatctagttttttttttttttagcatgttttaaaatgcattagcattacaatttgtttcactatttcaaatgaaatgttttaaacttttaaaaatatttgaagtcttatataaaatagttatgacataggggtgaggaatatttgttctgttgtcttcaatattgaaagttaaattagacagctgagtatcttattcctgttaagtgggagaaaaagttaagtcagagtttcatgctctatctaaggctaaaggacattatttggtccaggatggatttgaaattacagtgacctgctgaacttagaaaggctaacatgaaaatcttatttttattaaatattcattttctatgtgtttattgcttttggaatcatgtataagtataatgatgtttctatctctatactttataatgtattttagattagagccatacagattgccccttgtatgcatactgtatttattctcatattgaatttctgacctccctcttcagcatgagaagttcctagtaagagacttctcacctacctgtccctcccaaaataccaggccaaacaactgctgcttgttagggataaggacccttaggacttttaaatttcggaatctcgctttttgggaattttaaataaagctggctctttagacaacttagatatagtgataccttcagtgtctgcctcattgctcctttgctggtttgtgctagtaccaaagctctgtagctcacacaattaagtgtcttcttgactgatccatcgcaggaaaggagtcagctggaaagaggtaccataaagtcttatgaggacccacttcctggaagcaaagtagatcctggtgaggtcgttcttggcccaaaagagtgtcatttctcccccatgttccttttaatattttctttctggtgacatcctactctttagccattagctatttcagtgagtcacttctcagctaactatctcacccaactcagaaaaagcagcgtcaactcttgaaggcaacagaaatagcagatcaggaagaaaatatgggacattatttttgtcctatgatgtcatcagtcaatcagaatcggcatttccacatgctgttttcaggtctgttaggatgagggagttttaactgtctggactctacagtatgttttagaatcattagttcttcccagaatagtttttccaacatgccagagttgctgacttagaaggaatgtgtttccaaggcaagtaggggcctgattggcctatgttgggtgagacagattctggtcctctctctttgggagcttggtatgcagtctgtcagtgctcatggcatcaacctctaactggcagttttgatgaccatgttctggatggattcttgaggttttgacaaacactttcccagagtacagaatgtctttgcttttaactttcatccaaacaactattttaatccttagcaaagtagttattcttttgaaatggaaaattgtgggtaaatgtcaagagagctgtgaaactattcgtgtcatatttaaaacattcacattcaattaaacccaatttcatttcaaatctattcaataatagtaacgggataagtaagtggagtgtccaggcttgccttcctaagcctttgtctctcagtaaactatggaatgtggaggtggtcctgggtcatttctctgtagttctttataacctacttacaagtaaggaaggcaggcaggggtttagaagttcagcattcagcaaaattgccttgaaatatgaaaccacaagtctacgtgactgattgtaggaagatttcagtaaatcatactcaaattaaaacatcaaacaagtaacttttagcaaagattacattgttatgtgcaatttatcccctgaaagagagtttagaaaataggatgatataacaatctcccacataccttaagatacaggtaggcaatatggggtttcttttctctttttttctttccccctgcatccagcctctaaattgaacagctgccaggttttatttcctttcatttctttggcttgtcaagaggagaaaggtcagaagtgatcgccagctctcactgtttaacagacagaagcctgtaattgagagtaattcccgtgcaatttggtaggcaggggctgtggcaggctggctttcagaagctgtgcggagagagaagcgccagtgttctgtaagggaatcaagttaagtcacctggccacagattgtttctgattttaaccaaaatgcaccatgctgtagtgctcacattaatgtccttctctgagaagaatagaagtgtaatttatttttaactctactggagtgccctgcagctaaaaaacatactgaagcctggaaattctggttatgaaattctttacttttaaggagaaaaaatggtttattattatttctttgtcagagacatttacattcctatttaagattgaaaccctgtggctgtatacatgtttcacctcaaagtgaatgagagagtttactcttgacttccgagcagccaggacctgagatttctgccactctggaaagcatcctccaccacagaagtagttagatgagattgtggttgttacaaagcaaagaaaaagggctgcagagatggctcagggattaagagcactgactgctcttccagaggtcctgagctcaattcctagcaaccacagatagatggctcacaaccatctataatgggatccgatgccctcttctggtgtgtctgaagacatcaacagtgtactcacatacgtaaaacaaagcaaagaaagtcgtaactcaaggaatttaataattgaatcattggggaccatagtatgtaggttagagcaaagcaatgctaattctgttacagaggtgtggttgttatctgatgaaatttctaagtttgggagggtggaagtcaatgttttcctaagaattcatcttagaggttttgataggttgttaggtcagacatgatcagacatgatagtgggcaatgagtagctttcaaagggactaaaactaacccaaaataattctggtccatgatgtgttctttactccaaagtcatccggccttgaatccattgaattcaaattagacattgtatagcagaaagtgaatttgaattatgtatgcaaattttatagtatgtgtcataagcatgaatatacaaagtaatgtgtttattctctcccccaaaatggtgtatccatataagagacctgaattgtatccctctttaatgtattcatggtatacaaagaaattgcaaattcctcttaggtcaccaaagccaattatagtctaacattcaatgggcaatattgggctgaaattagcaaacacttttgacaataagtgtaaatagaccatgtcatgtcaagaaagaaaatgtatttggattttacaaaacttcacataatgcagaggtatcaatttcgcatttttcttaagctatattaaatcattctactttgagcaacctttctttccatagtttcatttgataagtattcatcctacaatgataacatatatgcactttctttagtaggaggagctgtaattttcagaagcatgacttgaaccacgagcagaaaaatgattaccagctatgatgggtatgcctgtgttatttcacacttagaggaaagatgcaaatgaatgaattaaattaggagcccaattttcttcttaaatcagtatatttctgcctgtcagaacccaggccagagtgcattattcttaatagactgtgatttgtattgaaatagaacaataaatctgtttattgaaatttatttgctgctagggttttggtcgttctgactccgtgcatgagcagagtgggtgtaataggcagggctggcaatgcagcggaatgccatttagtaagtgatcacacactatctagactgaagactgattgccagcctgatgaggtcccatgcatggcattcactattttatactgcactgttccatggaaaacccatgagttcttccgatgctgccagcagggtaatagtctgccttcatgcctcattttttaaaaatacttacacactttggtcccctctaaggccagcttttctcttgaatttcttcttccacttcagttttatattatttgtggtgatttcatctactttcttctctgatttcgtaaagccaatttaagacaggcttatgatgtgttgactctaattgacacaagagggtttcacattattcaggatgactccagggagaggcttttgttttgtgtttccaggccatccttggtaaacatataggatgaataattacaaagggaaaaacagtcagttccatttgatcccccatagtcccttctggataagaaggtttgctttgcccttgtcttagtttatacagtctcagtggggctctgctcaaagcaagatctttttcagcttttatgagatattacttgatgctgcagagaaaaagtcattatgaagtgtaatgatgacatgcctttcgtgagaaacccacattactggtggctaagaaaaaattctgcttctctttatttcagggagtgtgaaatgtttgtgaggaaatgaccaggtagtcatattggtttttttaaatcctaaaacctacctataaagttgacaggcagagacctttcactttctttgtaggtcttctactctaaggtatcatctctggccttggtattgcatgcctttctttttgttaacagagtatgagactcaactctgccagaagaggtataatcattgcttaggaaacacttaggacatagatgtgatggaaatagccctgttaagtttcgtcatcctccaactctacatctgacctgcatacacaatgtccacagagcaacctgttactaccatgctcctttgggattacagttgagcctacctttcttcttgcctttcaatactgcagaacattttaaaattttattttaaaaatttatttattttcatatagtaaatttttaatgcaaattcagacagtcactctttgtcaaggttccaaagacaacaaaatagaaaatgacaaaggttttatttttttctacaaatgtagtagaacaattgaatatacagtgtaaaaaatataaacctagacatagccttgtaatttattaaaatgaacaatagactaaaatgtaaaatttagaagaaaaatatggaaggaaaaattcatacagtcatgtgcttggtagtaagtttctatatataacagcaaaaatgggacccatgggaaaaaccactacatagagctttactaagacaatactataggctctatagaagactctacagaacagaagagaatgctaacccagagtaggggaagagaaatggagagactaacctcagagaaaaggtaaaggactgggatccttcataacagattttataatgacaagaaaacaagttcatttaaagacaagcaaatgctgcaaatatctcattatgaaagattcagggacagaaggtagatgaagagatgtgcaagagcatactccaaagagaagagcaggttccacaagacactttctagaatagacagagccttaaaaaaatggattaagccatcactaggaagttactagattgggaattctcaggttgttttagagaatgtcaaattctgtggtccctttataaaacagtttttctatttcttacaaagttaagttttgtcacaaactgtcatcatgttcctatctaactggcatgaaagcatatgctcttaccaaaacttacacaagaatgccaaaggcagaggggtcctaagaaaattgtgatgcagttatgaaagaacctagtggggaaacccccactcaatttccattcggcgcgcacccaggaatcacgaacagacgaccatcttgatgtaaaagcatgaggtagtttaatgacggagctccgggccgacacatatctcccacaggagacagaggtgttgaccacatggtggagccataatggcggagctccggtttgaaacgtatctcacataggagacagtggtttcgacccctacgcttggaagctaggggtttttatagaaaaggggtggggctgggggaggaattggtgcggtttcacatgattggtccatttaaacatcaacagactgtcagaagggcgggagatagggaggcactaggccagtcaggacatgtaacgacgggcctgcccgggcatgtcctggcctgttctgctatgttctcagccccaggtttcaaacctcacaaacaactctttgggctatttgacataaattacatgaatcacatgtctcaagttttatttcctttcagttacatggcagggcattaataaacaataacaaagatgagctcttactacaccaaagataacacaggagttatacagctatagccagcctggaaaagcattatattatatgacagcaattatatgaattgctgatttaacgaaagcgttgtaggtaaaaaacaaaaaacaaaaaccaaacaaacaaacaaacaaaacaaacaggacagtggttctcagagctttaggctaaggccaaacagatgcagggcagggtcaaactgttctgtcatactgtcaggtggacatgggacactctgctttgttgaagaccttgagagtgtacaactcagagtgtgcatcataaaggatggaaactagaaatcatgcaggagttcaataggtatgtgctggacgggtgtgtcacaggacagtgtatctccagatctctgacgtatttgttctaagatttccaggccagaaaccatggaggtaccatgctctagacacacagcttttcctcataactgcctataaatgttaattgctaaattcagcatgtaagaggttaacgctaataattaatggcagattagaatatttataagcaataccttacaataaaagtaatttcagtctggtcctttcctaaaatatgttaagttctcagtgcaccatagagataatttaaatcataccccacaaaacgaaaccactgtcgtgggaatccattgtagttttagtgtataaaattcctaactaaaaggagtgagagagaatatgttgacatgccactagaattaaatgtgttttgtaaggttaaacacaagacaaacttggatcatgttataaccttgtaggtgaaatcgttttccttagtggtatagattaaaattttgaaacatttaggggagtgtgtgtccccccatgtttgtttatctgtctagacttgggtgattaaataggttgcatatgattcctgaaagccagccctgaaagtattgttgggataagtaggatgttacagacaagcagaaaacacacttggctaaccttgcagtgataaattagactgacgctttctaactctgttcagcctaatagagacactactgactgatttagaggtatctatagacacactcatgcatagaaataatgactgacttagaaatatctatagatgcacccctgcattttcttatcttattagtcaagtcacttgggaacaaccactaatacccagatcttagtttccaatgccgttttaccactaatgtaaagaaagctctttgtagatatacttcattctaggactctgggtagaaaacctaaaagttctgccttgtacagggaggtgatgattccctagctggtttttgattgtgtcaataaagaagtcagaagccagttgatgggtaaaaggaaaacggtgggacttctgagtcgcaggaggaggaagagtagatgcagggaaagaggagggagctctttgggccaggctttggaatgagtgggattatatccataaaagatcttggggcaagccaggagtggtggtgcatgcctttaatcccagcactcgggaggcaggggaaggtggatttctgagtttgaggccagcctggtctacaaagtgagttccaggacagccagggctataaaaaacgtcttggggctgccagatcctgcagcctccaccaccggcagatggctgatataggctagctaataaggttaagacaggagattctttacccagcaattgtgttatctggaaagttttaaaataataaagccttctgatgtgtttttcttccacagagctaaggtggggagaggcagagcagctgggtgatagctggctgcttggcaaagctagacaagaggaatgggcaaattgggagtaaggtcccccagcagctgatctcagagctaaatcgggagaggttggagtgtgggctgctgcctggaaaaggaggtagcatggattttaaaattacaacagagcctcaaggttttatggtgttaagcaagaacatatgcaaaatccaaaatgataaaagtatatgatagggccatgtttgctaattcatgtactaagtatagatggtttacttagagtcacaagtagttttggattacaagccaaagacctttgcttccatatggaaatgaacaattatttgagtaaattaataaaaaggaggtgggtgaaggagaattgcagatagacaaactattaggaaacagatgtttcctttctacctagacgtgttgatgatcatacttcttcatgggggagctgtgaggctaagggagccgcctttttgttttctgtaggtggggagaggcaccaccactgctaagatcaccttcaaaggagagcaactctgcttgattttcctcactgaaatattctgcttctccgcccccacccgcatgcacaaagaataaaggaaaaactgagtttctcacttgagcaaacttttcataagaagcccaccaggattttgcctagcaactagatacagctaaataggaagagagaaatctgctgacatgtcttgcactatttaaaggtgttaatgggcctggttttggcagagcttgtggctggtagaatagacagcttcagacctatagtggaaacagttcttgctgcttagcccagataaacctagctccatggtatctgtctttccctgggcattctgagtgttcatctgtctgtgtactgtatagtcccagaattcagattccacttctcacggagcatctataagacaatgctccatgtgggttaaggattatggcttgtatcagccatgtaagaggccatgcttacaccaaggggacaatagaagttatgtaaaagttatgttgcattcctttggagtggagtataggctaaattaataaccaggagttacaatataagagatgtaagagtctcagggtgaagtcatgggatatgattttgtagtgctgaagaactgggtgggtgaaacttagcaccattagcatctagagaaatgaattgggaatattttcccttatttgcaggaggccaaatcagggtgatatgcagggactttgtgttttaatttccccaaaagcttcacacctttccttttcttcttctcttagtttttttcccatcctccctcttctcttctcttctcttctcttctcttctcttctcttctcttctcttctcttctcttctcttctcttctcttctcttctcttctcctcctctccttcaaacatttctctttttaaagatgtatttattttctgtatatgagtatgttgcagctgtcttcagacacaccagaagagggtatcggatcccattacagatggttgtgagccaccatgtggttgctcagacttgcacccaagacctctggaagaacagtcagtgctcctaaccgatgagccatctctcctgccccacggggcttctcattcagcaggaatgtgaccagtcttaactgaaagtcactaggatccccctgaagattttcatgtggggattggcatgaccaactttgtgctttttgggaaaaccgtccttggttattataagtnnnnnnnnnnnnnnnnnnnncctggtgggcttcttatgaaaagtttgctcaagtgagaaactcagtttttcctttattctttgtgcatgcgggtgggggcggagaagcagaatatttcagtgaggaaaatcaagcagagttgctctcctttgaaggtgattttagcagtggtggtgcctctccccacctacagaaaacaaaaaggctccccccccctcaccgtccccttccctctccttctttccccttcccttctgtgggactgtgataggcagcctattttggttgaatagggcttgctctggcaacccagtagagaactctacaagggatggaaaagtaagccaagttcccagactcaggtgcctgacaccacagagccctcaattccataattctgtgactatcagtcatgcagacaatgtcccaagcttctggcattctggctagactccacccccacagttacctgactatagccaggtatgctcctccccacagttacctaattacagcaagatagcccagcccactctaagaggggctgcttggcccctcctcactctctttaagccctcaccttttttactctctagccctccttccctctatctctttcctcctctttccacctggccatggctgacttctctccttctttctatcttctctctttctccctgcctttctacaataaagctctaaaactatagactgtctctgttcatcaaggccctctgtgcttgaatgatgggataggccctaataagctgtgtctaacctccagctggaaggccttcctatgctcaagccatggactggaccaaggtctcccacccacttgggaactaacaaacgccctctccccctgccctctcctccctttggccctggcccctggggccctcattcaattctcagctcttccacagtgtccatcagtgtatgggatgcctggagctgggaacccggtgcctaggactgccccttgtccaccacccgctgagctggggtccatggcttcacacaaccagccacccacccggcactgtgtggaaagcatgcggcagtcttccatgtccacttggccagaacactggaactctggtgggacttggattttctcccacttccctatattcccccggtgcctactgccctgcacccttcccctcctgtcctcccctctcctcccctcctctccccttcccgtccctccctcccttcttcccttcctcccttccttctgtatactagatcaggtatggtttagactggcattgaattttctattacgtaatgaaggatgactttgaccaactaattctcttgtttccacctcctaaatgctgggaatacaggactatgtcaccttgccctgtttcatatgatgtggtgaattcaacccagggtagtgagcatacgaagtaagcaaatttaccaacaaaacctctgacatcacatagtgttaagactcctagcctattagctgtgtgttcgtgggaaatgtccctaccaaggtggccacatcttctgatgaggatcatactctatcactgtagggaaactggagactttcatgatgttcacagaggattttagttctcattttttagctgcttcgtaaatagcatccaggtggtacttttacccactgtagttgaaaggaagtgtaatttttctctctaaactccattttaaagtaggaactaaaatttcacattatctaataaaaatagatactttaaaatatgttgagtcctttaaattttgtgaatgatgtgtatattaaatattatcagcttgattctctctgtctaatttccagtatattgattcagagagaatgtgaccttcccatctggttctttgaagtgcagatttggctaaaatttgagatatggtattttactgaagttctaaaagaaataaatgtgttacttttttcaaaacattagcatcaaatcagaaatgaaggcttctctacattttttacaacatacattctgctttttctaatataaaattaaaaaataaaatacatatcatcctgaatgtcttaagacaaaaaatggtgtgaaaaccacaagacgtggagctgttgagaggcagctctgcagattcttgcttgtaagctagaaaaacaggctgaggccagctcaggctcagcttcactgtctcaggaagaaatccttcagcttgctttccagacctcagattagggtgagggtgaaaagcaaagcggcaggtggcccataactgtgacagtccccagccatcctgccatgttttaatgattctcttgcaggtgtgaagagtttttccctcctctttttataacttcagcatatgcactagttgggttattttggttgcaagagcatggtatgatttctccttttcatttaaatgactcaccaccaccaccactcttggttttcttagttataaaatcacttcagtgtgaccttgcacatcttctgtgggagagcctgatttttttgtcaaagttgtctgtcacttctatcagctgtttaatcctcactcatttcctcttctgaaaggctgttttctccagtctatatcataaagattgtgtgagtttccactgaccacacttacgtaacatcatccttgtgaaggagatgcccaaagaagttagaattgtgtctcaaagtcaaagaggacttgacttagcttcatgttgtttgtgtgtgtgcttgtgtgttagagaaagagagagacaaacagagagagagagacacacagagagagagacaggtagagagacacacacacagagagagagagaagctggaaagttactggcttctagttcctgtcttgcaacatgaaaaaagtaagcaatggaggaagagaagatgtcagcagtataagtaaaagggtcatgtttcccaccatgttcatgatccataaacatcttggatatttgccacttttagagacctgttttctgtggtatgtcacctatgcacacctgtattgtcactcagtgcctgaggttttatagctgtcaagattccttcccatacatcagtttgtctccacaggcacttgtctccacaggtcttgtcctgatctattcctcacagagatgatttgctctgccattgtctcccaaatgatgggtcacagcacaagctgactcttttaatagtgtaatctaattacattcagcagacaattggagacagggggcagcattaaggaaaaatatttcaaaatgactcagatttgcattctgcatagcgaattaatcttgctgtgtggcccagggcaaagagcatagacctttcaaagttcctgccctgtcccctcttgacctcatgaccctccgtggattgtgtgaaaaagctgagctttgcttcccactgtgtgaaaaagaataatgacccctaccagaaaagtggtgtgaggattggctgagacggaacagttcccaagagcctgtggcagtgaaggctgctgcttctcttgctttattttaggcctatggaaaggtaattctgagaactatttttttgaaaatctacctcagtgctgtctgggagtgcaattagctgtaggatgcctttctggaagtgtgtagttcccggggactctagaaacaagatgaatgtaggcgttctatagtgagaacaaagaaagaaaatgatcctaagcccctccacactgggagacaaagtgagcttttgctgatggggaactcctcagggagtgtagtgtttgcagtgtgccacacttgtaggcaaggaatttcattgccaagacttgcttgtaatgtatccctgactggcctacctgtgtctatgtacactaggctggcttcaaacttacaaagatctatctgcctcttcctccatgtttggacagaacctgattgtttaaatcagtctctgaaagcttttcttcaagtggtatcttctaaggatatgatgtcccggaatagagaaatctgaggttaaacatatagtttgtatgatgaatagagtgctatttgaacttgggtttatgaaataaatctgactccattttgctagtagttcttagctgtcccctgcccttgattaaccatttgggccggttatagttcttcagtaaaaaccagtgactcagttacaggtgttaaaccccaatgaagattgtgatcagggagcttagttgtggagttggcaccaattagtcaggagtcctccctgagctctcacaaatcctgtacttccatagtagacatttcttcttttagcatattatgctatagctttttggaacaattcatattaaatgtcacactgggagttggtgtgaattctttacttccattgctaggatctcagctgtgcccagtactctggactctctttggtggtgatgtgctcctctgtaatccctgcacaggggggactgaaaaggccaagtcaagagttctgagcaagcctaaatcacgcatcaagaagaggccttgtctcaaaacaaagcaaacaaatgagccaagtaccaacaacttctttgcctacaacaacttgccttttgtatgactgcccctgcatttgtgctccagcaactaaaatcatctgggtttcttatgccctctctgattcacagctcttgccctgaataacttatgcaaagtgtttctgtgagaaagtaatgggaatgacctacctgggtggcaacctttttgaaaaaggaagaaaacacagtatcagtagaatgagaagtttctagaacctccatctccagagagatgagtgctgaatggtttggctttatcgcacatagactgaaaactcaatgatagttcttcttgggaaagtgtttctgaaagtactcgttttgccttggtgaggtaggctgtggaagccagtgcttctgataaatgtgtcccttggctattacaggacggaatatgcctgtttctcagccctgcaaaagatcgctccaggtttatctactgctcatggaagtatgtgaaagcgcagttgttactgagttgtttttgtgtgtttgaaactatgaggttaaagagaactcaatcacatggcattgctctgagctatggatactcctgttaatgctttaggtttctcattaggttagcacacagacctaataattttttgtttttctcaattaactagtggtgtcttccaatcctaaaataggttccttcctcccttgctttctctaggtaggacttggattattgaatcactgtcagacccctctctctccttccccctctttcttatttacacaggttcttttttatgcatttatactccctagggacacttggtgtgatttgtgacatcctatcctggtttctcaagctcctcgtgccctgctttgccatgtgttcatcgtaccctgctttgggacatgttcatcctccatctgacttttcatccttcccctcagagcaccacacattgcatttcctcccacatgttgtatattgtatttcccttttcccagttcaattttgaaaatggaaattttcaaaattcaagatatggtacttagtttggtgttttatctgactgcccagcctttctttctccttacttttctctccccagtttctatttttcccccatgacttctttctcctggtagagggattccatttccagtagagaggcatgagaagcccagagcaggacttgctgactcaggactagccccgcagctctttctgtccatcattctctgccaacacacatctttatacagtggagacttactgggaaaactgatactcccagcttccagacacttatcagcatgtgccctcttcttgcaggaagacctaggggtatgtctgtttataccaagactggtgccagctggcatctagcttagggtactataactcaaccacccttgtttaaggctgtgttgtttgcttccacgaaaagtacataatttgactcctttctcttgggctctgtctgaatcattgtctctttagattggtgctacctaacacacagtgttactgtcacctgtggctatttaagtgtagattcatttcaataaaataaatttcaagtacattgtttttgtcaataatgttaaccccattttaaatgttcaattggtctgtgtgacatttggaaaggagcatgtgagatatttctgcttggccataaagttcttttagagtaggcaataagattggcagtggtttctctgggttgaattaaatagccagctttcataaaatgtgctggagttggctttgtaaggattttgtagataatggtgtgagtcctatcatagtctgactggtaagttggtggaagaggatgtactggtaatgttctccatgttggaacatgtataggtatagtgtacactccatggttgtattagtcagggttctctagagtcacagaagttatggatagtctctatatagtaaaggaatttattgatgacttacagtctgcagcccaattcccaacaatggttctgtagtagctgtgaatggaagtccaaggatctagaaattactcagtctcacaaagcaagcaggcgaaggagcaagagcaagactcccttcttctaatgtccttatattgtctccagcagaaggtgtagcccagattaaaggtgtgttccaccacacctttaatcccggatgaccttgaactcagagatttaatcttctggaatccatagccactatggctcaatatctccataccaagatccagatcagaaacttctatctccaagcttccagataagggacggtgagccttccaattctggattgtagttcattccaaatatagtcaagttgacaaccaggaatagaaactacaatggtttacatgttggaatgtctataggtatagtgtacactccatggtttacatgttggaatgtctataggtgtagtgtatactccatgatttacatgttggaaagtatataggtatagtatgcactctatggtttacatgttggaaagtatataggtatagtatacactccatgctttacatgttggaaagtatataggtatagtgtacactccatggtttacatgttggaaagtctataggtatagtgtatgctccttgtctttgttgcattttgtaaaatgtattttaagagtgagctcagtacctttcctgagaatctgctctctcctttctaaggtatgttttctattcttactgacgttactgtttggacctaacaaaaagtcagtgtacttaacaaaaatcagtcattttaaccatttcactttttaaaatgtacctcaaatcttccttcttctaaaccatttttactaagagctgtcctgtagcacaggttgagaacctattgttagttttcagactagcaacagacgttctccttcctcagagccccaccttccctttctttaagcactcatgtaacataagctttagatttaatatgcctgtagtaacacacatacctttgatttgttcagatttaggaataaatatccagtatgttagaccctgactttctacattgtaaagctccatcttaataaatagccagctctgtaggggaaagatggttttattagcaggcagcattaacactgttgggttccgtggttaggttgacatagtatcattgttacagaagataaaatttgaatttgataatcatttgcggagcagtgagcaatagatgttagaacaatagctcaggattttatgggagcttaatcattatccacccccatcctttcattcagacagtcagaccatatttcttgacatttactacactgtgcactgtattaactgctggctgattcaaagacaagaagagatggcaataaaggatgccagactctgtggcagaggagaaaagtatttgactgatctgaagacttgtcacctgtgaacatgcccagggtcctaacttagagtgatcttccacgtggcttagagttctgctctcacaatctagagactcttaatgatttttgaacagtgatatttgcattcatattgtaggatggtattacagattgtgtagtcaatgttttaagagagcttaaaaggtatatcaaaggattacttaattttaatgtggactatctcaaaagatatcctgaaggaaccaatatctaaatcaagatgtgaaatggaccattcaggacagaattgcatacaaatttctgaaaattctcagtgggcagggcagagcaattgcattaatagtgagtaccccaaaccttgacattctcaccttctaaaggtggtacctgtttcatagataccatcatggtagcctccaactcataatcctcactaagcctgtggatcaccatgactaactggtagaagccaccagccattcatctttgatttctgtttgtatcagtgtttaccatggcagccaatagcatcttaattctttctgtggcaaaggttacaacgcaagtgtgcacaaagccttagtggattcagagtgaactcactgaacctgctgaggtctgtaacccaagagatgggtttcctttgggaactcagagaaaacttgttttctttaaggtctagtcaggtggctatagcttcctatacttacagatggatcagtaagtctagatattttacaaaaatcttcatttttgttcataagtaatctaataccatgtgatatatgatatttaatatcatatattaaacatatttataaaactttgttcatgctactagacaaacatggtgctatctgttagcatatgcatcttcccctcctcctaatttttggaagaccctagaatgtccttcagagttttgtgccaacaggtcttttccaggaactacacctgtcatttagctgttactttcactttgatagcacctccttagacattttaatatcccacatcctatacaacaaaccaaaatatgagttctaaagccatagcatacttcagagaatcattggagtacatctctattagtttgtacttggaggaggaaagacaaacaaacacacagaagtcaaattaataatagatcagaattgactgaaactaagaacttttgatctcaagggcaataacatcaagagactaagaaaacatgctgtaggaggagggaaagcatctgaaaatcacctatctatacggttccgtgaccacatatgtacagcccaacaataaacaggtacaaatggcaatggacttgggtagacctttattcagagaaaacttaatttgacagtaaacatatgtacaacatcataaatccaaatcaaatctaaaagacacaacctcatacccactaggatgttcaaaatcaaggaacagacagtaacttatgctagggaagagtgggaaaatttgaaaccttcttgtaatgttggtggaatgtatgggatggccactggagaaacagtttgctatctcctcaaaaagttaaaccgtatttccttggtttatatccaagatcatgtgcgtgcgtgggagcatgcatacacacacacacacacacacacacacacacacacacataccttatactagcactgtaagtcaaactatataaatatctattgatggataccaaacaaattctagtatatagagtgtggcagaatagaaaaggaaatactgattttatttttaacaatcatttagcatttaatcattttgtacttgctttatttacttggaggtgaagaaagggctttgcacttaaatagataggattagtatcatattatgaatttgtagatgtttttgaattgtttatgtgcttaattatgtcagttgtagcctaatgaaaacaagtcatacactttgaagctgtagccttgtagtgggactaaggtgtcactgttcctcagcctggtcttacaaccacttctggtagcctcagttttgtttaaggaagataaaataacctgaacttcaaaaggttgtagcttcttttagtgcaggaatacatagcaattagttggttcagcgtcttgcttatattaagtcttaaaaaatactagatgctgttgtcataaattattataattgctgttttaatttacaaatgtcatgatcacaagatgagctaaagaaataataccacatccatgaaaaatggaggtaaaagaaatatgctttattggctaggtgatgcaagtaagctatgtgcttgcttgctctctcgcttctctctctctctcgctcgctctctctctctccctccctctctccctctctcagtccctccatcccagatacaaaaatatattgaatggaacattttgaaaaataaaattgaatgtttttattgtgagtaaaatctcagctctattctataccagtgtagaatgttcctaccaaggtagctacccttggtcttagatcttctttctatccttgtatctgggtccagctctgatggccttgtttgtttctttccactctaggctgttttccatgaaaggcactctctttgttttgaggaccttttctactcccacccacttcctactttttcatagccctacaaaatgtacttttctgatacctgatccacaaacatcatcctttaaccaactttttatgaagtctgatattcattttcattccttttttgtgatgacctacaactctcagacattttgttgcattaataaaggagatttctcagttgaagtatctttttttctatttcattagcctaggatctcatttaaagctgggacaatgggagatatcagtcatggttgtattctggcaatggatcacttgctggtacatcacaggcttttaaaggaatgaaaaaaagaaattaagatgggcccatggacttgtagaattgatattgtgaaaaatagcttattatcaaaacttgtctgcaaaatctttataattgccctcaaaattacaatgctatttatcaatacctagaaatcaatagtcctaaatctctgtggatgcacaaattaccctgagtagtcatgggatctttaggagaaagaggaaaacgtaatgctagagaagtgacaacaatatgtggtctcaaactagactgcagagccatagtgacatgaacagtgttctattggcacaaaagcagacacagcaaccattagaaatgcagcatccagaagaaaatccttacagctatggcagttaatcttttacagagctgtctatcaacatgtattttagagagaagccagccttttcaacaagcagtgcttggaaaactagacataaacctatcagtagtgaaattggatccacatacctcttcctacagacaaatgaactcaaaatggaccaaaggctttaatataaaatatgaaagctggactacatagcaaaaaaatagaaaaaaatacttcaagatactattattggtatggacttccttttaagcagtacttttaaggacccataattcaggagataaactcgaggattaactatgggaccgtataaaattaaaatacttctgcttagaaaaggaaatagcagaatgaagctatagaatgtgagaaaaatgtctgtgttgcatatcctacagaggaataatgtattggatctttaaagaactaaaaacatcaaccctaaagctgaatcacctagtgaataaagatgctagttagcagactataagatgcttggcagggaaatgcagatcaaaactacacagggtagtcatggtagctgacatggcaatgagtgctgacagttaatggtggtacagccatgctggaaatcagtgtggacattcttcaaaaaccaaaattacagctacagtgtgatccaactctacaactgttgggaatagacctgagttatttgtaataaactcttgttcattcatgctattggtaaatattcacacaagtcacagtctagagccagtgtagaagcccatcaacagatgaaattgtaaagaaaaggaatatatatgcaactgaacgttattcagccataaaaatggatgggtcggaagatcattatattaagcaaagcaagtacacagatgtgccaatatcacctttttttttatatgagaaatctaaactaaagcttctatgcatgtgtgtgtgcatgcctgtgtatatgtgtgtgtgtgtgtgtgtgtgtatgtgtgtgtgtgtgtgtgtgtgtgtgtgtgagtatgtacttgtgtacatgaaaggtaactatgagagaagcagagatataaagcatgggaggaagaagataatttaatggagtatcatatgaaaacagaagcatggattatgctggacagaagagtccaacaagggctgggagaagaagcagtgaatatattactggcatgaatgagaacaaagtcagatgatatttatataaaaatatcacaattaaaccattatttgtatgttaactaaaatatacaataaaaataggattctaagaatgagatgatgaagtttaaaatcaattagaatccatgtctcaacaggagtttaaagtagtaatttccctatagaattttatattttaatttttaattgtataatttaattgtatatgcatatgggtgtggcataaacaatgcataccagaagttaaaagggtattctgattgtacctttattatagaatttctttattgtttttatactgcatgtggcagcctagctgtcccaaaatcagtccacaaggttctgtgtttctgtggtctccacacctcatctctctgtatttacgctagcattacagataagaggctacttgtctagcttttatgtggattcccagaatttgaacacaggtcctcatgcttgtgcagcaagccctttcccactgtgtaccctgagcagaatttatatttatttcaatagaaaccattcaactgtccaattgtcatgaccacccttcatgtcatatgctcacattattgcccaaagggttccatggacagaaacactttgctctgtttctaccgatggtcagagtcatttgtaacctaggaaacaacactgagcttgtggtgaaaatatatccttcagaaacagtgatttgtatttcaaattagggaggaagccacaatagtaacattaaattaaactatacagatgttttaatgttcttgttatagtgggaaatgaacagtgcctgagaagtgctccccatgtcccctgtggctggagagttgtgggttttctttgtaagtagatctcactgctttctgagaacttgcccctttttgctgcctaattaacctcctctggaccccagggatttgaaatagctgaggccttaggagacttgcttacttatgttggctctaagtattcttgttaggggaagacaaatggatgattaacaatgcattagcatctgccaaatgaaagtcctatgtgaagaaatgatgtgagtcaggtaaatggaaggatactaactttatccattgtttgatcttgcagcaactgttttggaaaggacaattctgttttgattagccttcattttaaaagttatgaatttgaaacataattattgagtcaagagaaaacatattttcaacaatttttttcatttttattagatattttcttcatttacatttaaaatgctatcctgaaagtcctctataccgcccccctcccgccctgctccccaacccacccactcccgcttcctgggcctgccattcccctgtactggggcatatgatcttcaacaatttatgcatgaaacagttacttagtctattcccatcatcctgtgctaagtgaagggtatatatgactgtgaggaagacaggatctgtttggttagagactgtgtttaaaatggccatgtggatggattgtcttccaagtaacaaaagtgctcactaaggtagtttcagttatcaccgaagctttgggctcaaatagtgagaactcctaacttcacataaacgtagccttaaagactcatgttgttagaaatctctgcccattatctttcttttgtttttaaggtaatttctttagtctctggaaaggtcttctagatgacaacagggatggacatgagtccacttgcttaagccaacttccagtctacctcctcccatcttcctgatccactgttataaacagtactcatttttggactgtttcaacagaagttcttagagcaactttcccaggaaagaactgtgagtagatgagaaagaaatctcccagaggagagtcaggttggggagtgaatgctggacttctaaacaactgttgttcatgttctaggaagggtaggacttcatctttatatttgccacttgaagcaaatctactaatttaagctacagtttattctccttcccatgtttaatttcattctcttactcatgggcattaggcattgttgtctgcctttgttaagtgtgtgtgtgtgtgtgtgtgtgtgtgtgtgtgtgtgtgtgtgtatgttttatgcaaatttatgtcaactgtgcacgtatgtatgcatacagaatccaagagtccatagcagaatattggatgtcttctttgaccactccctattttattgcctaaaaacagggtcactaattcaggagttcatttcattttttggctagactaactaactattcagcaaccacttgtaattcacttgtctcagctgctcagtgaaggggttttagacacgggtagccatgctggagatgtgaactcagatcttcatgcgtgcagggctcctgctttctgttccccgggaacctttcttagtgctctaagaatcccactgacactgagtttttagtgatccaaaatgttacttttctgaaatacacagagattacttttccaaaattcccttgggagaaaatgggtaagaagggtagttttgaaagaacttaatatttaattttggattttctctggagctgcagggattgcttcacttcgacttacagtcgcattaaaatagcatttatcaaaaatatagttttttaaaagtaataattatttcatgctggcttctcacctaatgaaataaagaaccccatatgtgaagtttataagtcagtaacatgtttgctacttctcctctctagaatacggcacagctatttctaccttatttagccttgaatgatcacatgatttccaagagcacctagtattcctaaaactattgagattcttcacatattcacttattgttttcatggaatttcttcttgtttctgtttaggtttgcaatgtagcaagtgtgggctaggaagtcgaggtggatggacaggattttgacaagcctttccatcagctgaaaacatgtgcttccctgacgtgtctttttataaggctgataagatggtattgacaatgtgggtcttccacacactttcaccccaatgttcaaacagctgccatcaacagtattctagatgtgcctgatggagcttgaagcagggcagacagtaacatcacaccgccccatatgtcaagttcatgtttgaggtctgatgtctgctgaggttttcacctaaaaagccttcagcaggattcataaaagcagagggggaaaaaaggaaggatctgcagatgctggttaccatggtgaaaagagtgccagtcattacaggagtagcctccaacctttagcctctctgtgtggtaccagtggcacatcacaggctgtacactgtcaagcaacactcaaatgctgacattgatggactgtggtctaacagggtggatcttgccttgagagagcttggctctttctttttatttaatcttcctttgagagtcaagtcagtaatcacaaccgatatggattagtgccctttgtgtctctacacctctgtgcctcattctgagctggactagaccctggcaggaagtgaatggtcatttttaggaattctgagtcctagagagatgggcccaagagggatcctttaccttggatctggcaagcacaaatcattagtcctatggttggattggcagggatccattaacaagaattttgtataatcagtatgctggtggcaactggtaatagccagtgtacttgaaaatgaaggataatatctgctgcatgtgttagattaatggcatcagcttaacagccacagagggccacggaagatgcctctctggaggaaggaagccttgtcagtctcctttattcttcaagccaggggtcctttcaagtgtttggtccccaccagagcagtaacatagaattccttctaatctgtagaacctttttttttttcatcaaaatgtaaaataaattccttttcagtacactaatgggatccactcaggaaaagtggagggcagatttccagttctttagcagtgattaactcttcatttttcatttcaggatatgcactatgagaaagtttataaacaatgcatggttcatttacaaataacagagcattttcaaccattccatgccctggtgtcctcctgtaggattacctgccttccctttgtggccttttttggaagtagggtcctcagcctgcagctggcattgctggtgtttcccacatgtccttaccaagcctttcttttcatttgttccctttcaaatggcagctggtcagatgctctagaggcttaagctcaaaaacacatcctaggaccatgagcttaagccagggtgaatacttgttaggaattcagttattcagccaacactgagcccttactctgggggggtgggacttggctccgttacaaagcatcccctgctcccctggcatgttaagagtttctctggtgacagtgaacacagctagatgcccctgctttcatcatccttcgcactccctttatgttgccatctggctgacttgattcatatatgctagccacctggcatgggaagatagctgggctttggatctctgatcctaagatcttaagttcctaaggacctcgatataatctaaatatcacttgcacatgggtgtgaccctttaaatatcctcaaactaaggaattttctgtctgaattaccttctctagaaaaatccagaggtttggtatgccaacagaagagagcacaagtaggcaattgatagtcagtatgtgaatattactagacaaggagaaagtggggctatgatagcattctactttaagcactgttttattgatatcacagtgtgcaaggcagggatggtatggggatagcttagttgggaggacagaacaaagccacagcaagctctaagacaggcagtgaatgatgaatacacctgtagccaaataattaatttgacagctttgtagggttgctccccccgcccttatatcttttttttgaccaattactttcaataatgatggcaaactggcttctacctctgactgtgttagagattataatgtcaaaagggcctttgtaatgtcttgtgtgtcttaataaacctgtcagctgaggttacattattttctaatttccatcagggaaacatggagtggtacagctgggcagagattccaggtcatggtgtatgatttcagattggcgggatgtgccatgtcccatcactgccatggctgtgtagcagtacgtgtcagagaacagactttttttaaatgagggcctcactgacactttgatgggatgttaccttgtgtgctgtgaggaaacttgttgataagctcatatttcattccttgatcataactggtgcttttgtgtatattgtccatctcgtcagatgattcactttgctcaaatataattctgggattattatttttaaaagcttattattattggaaaaagcttcagcaatctccctttagcctacagccttgtgtttatgatattattgtctgcaatggtttggaggaagagattattacagatgtcatccttgtaattctgctttgagtaagattctaacctcaacactggtcatttaaagacaagcagaattcacaagtgcccctgccccttagagactcttcataacatgatgtctgtcttagtgtattctatctctgatgaaccattcccataaggaaagctggccatgtcaaagttgttcaaagccttctcaggatagaagaacccttttatgacagcaagccaaagttaaaaacattcaaacaacaagcaggatgttctcttggttcaggatccgctacatttatcatgactggactgaaggtccagggcacattgcactttctgaaggcattactcccacagggttaagtgttactgtacctgcatcatagcaaagtactggacaggtcacatgatgtagccaaatgcacttcggtcataaggaataaggcagggatccaagcccagttctatcaatagacagttaagtcatcacagaaacatgtgtacactgtcacagtgacatggttgactcgttttaaggttttagatcagtatttttcaataagtagttactctgacttctatggatttttggcaatgtctcaaaacatcttagattgtccaaaacagataagagctgtactgacccctagtgaatgccactaagctgcatgtaaaatatggtatagacctcacagaaaggacccaaatccaagactgagtacaaaagttgaaaacttgtattatgtggtgtgggaagctagacttctaggaccaccagggggagacatccaggaagaagttcccaagaatcagtagaagggagaattcattagagaagaggatggaggaagcttctagatggacaacagacatgccattgaaggtgcacgggtgggaaagaactgaagagcttcctgtgtgggttaatcagaagagatccaacggcaatgatgatgatgtaggggaagggagagcctatagatgacctggtgctttgtgggatctacagggtcataaaagatcctcatgttaggcgagatttaaggtgagtttattatctcaggtgtggtaaaggccatatctacctgcttttgtatgacactgaagcatgtattgtttgatcgttaatattatcaacttgagagggtctgtatcacccaggaaaccaacctccatacatgtatacgagggactttctaagttgggttgataattgggttattttatccactgtaaatgtggacagtaacattaacatgagctgagatgtgactatgaaaaatgtgcagattactttcaaaagtaaataggtgtgctgtgggagactagaggaaagatatactaaaaggaagtctctctggtggaaacttagagttgaaggtcctcagggaggcatttgtttccaacactgctacatctccagtggccaatattgtcatttggccactcagttccctttattcatggtgtggactgtcagcatccaatagggctttttcatccttccctcactttgctctaaatcatcctttggtgatctgtcccattcctggtctcacaatatcaggcttatatattgctttctgttatcggtgcctccttgactgtatttctcagtgtaggatctccatctgtctctgccagtttaagagataagttcatccacatgccgttctgcagtgaggccctcagggtacccaggcatcatcaagcccgcggtgctctgagttttcccaggtgcattcacttggtatgtctccatatgctgactgtgactttgggccctatcttcttttcagtttgtagaaatgagacccacagctgcttgcttatgtctgcttattctgtccatcggttctgacacgcttatccaagtacgtgtccctcttgacacttactgtgcactattctccatgtgcagtatcccttctgtccctggccaacatccttctgcacagcatgtgcctttgttttccagccacgaggaagatacccttgcatgtactgttttcctgaggactcagtcacatcaactttactggaagcagaattttttttttttttttttgagtttttatttttttattttttttttccattttttattaggtatttaactcatttacatttccaatgctataccaaaagtcccccatatccacccacccccactacccctgcccacccactccccctttttggccctggtattcccctgtactggggcatataaagtttgcaagtccaatgggcctctctttccagtgatggccgactaggccatcttttgatatatatgcagctagagtcaagagctccggggtactggttagctcataatgttgttccacctatagggttgcagatccctttagctccttggctactttctctagctcctccattgggagccctatgatccatccattagctgactgtgagcatccacttctgtgtttgctgggccccggcatagtctcacaagagacagctacatctgcgtcctttcaataaaatcttgctagtgtatgcaatggtgtcagcgtttggatgctgattatggggtggatccctggctatggcagtctctacatggtccatcctttcatctcagctccaaactccatctctgtaactccttccatgggtgttttgttcccaaatctaaggaggggcatagtgtccacacttcagtcttcattctccttgagtttcatgtgtttagcaaattatatcttatatcttgggtatcctaggtttggggctaatatccacttatcagtgaatacatattgtgtgagtttctttgtgaatgtgttacctcactcaggatgatgccctccaggtccatccatttggctaggaatttcataaattcattctttttaatagctgagtagtactccattgtgtagatgtaccacattttctgtatccattcctctgttgaggggcatctaggttctttccagcttctggctattataaataaggctgctatgaacatagtggagcatgtgtccttcttacctgttggggcatcttctggatatatgcccaggagaggtattgctggatcctccggtagtactatgtctggaagcagaacttagcccaggccctatgaactaagcatttgtaactttcattattaaaagacttgcagatccctaggcagtggttatgaatcagaccctcttctcatcacagttatgaaaactgagcatgtgtcccagattgatcatggctgtatacctcgctgatttggtaccattttgcttttacaggctctatgataaacatgtggtgggggtccatttcatcaactgctgcagacttctcagccagaagggcaacacagttggctatgctactgatctgccaccttttaatgacctgataattaaaaatgatgggcagataaaaatagagcagatgaacacagctccacaaggcaggtcctctctcctgacagtcactctcctcaggcagggggtatgaacactcaaggacagaagccagactttaactggccaggaacccaatcattctttttctttttcttttttttctttttttttttgtgactgtaagcatattacataattaatttgttgtttccccctcacactatcagagtactgagtgaataattatatttgctttgtgtttgaagcataggttgtgtgtctgtgtgtgtgtatatatgtctgtgtctgcatgtgtgtgtgtgtgtgtgtgtgaaaattatctgtttaggactgttttgtgatcaattatgtggtcaattttggagaaggtatcatgagatgctgaggacaaggtatatccttttgttttaggataaatctccttgtacaaagctcaagtctaagtggattgaggaactccacataaaaccagagacactgaaatttatagaggagaaagtgggtaatagccttgaacatatggacacaggggaaaaattcccaagtagaacaccaatggcttgttctgaaagatcgagaattaacaaataggacctcataaaactgcaatgtttctgtaaagcaaaggaagttgtcaataagacgaaaaagcaaccaaaaaattgggaaaagatctttaccaatcctaaatatgatggagggcaaatatctaatatatataaagaattcaagaagttagactccagaaaaccaaataaccctattaaaattttagggaacaaagaattctcaactgaggaacactgaatggctgagaagcacctaaaaaatactcaacatccttagtcatcagggaaatacaaatcaaaacaaccctgagattccacctcacaccagtcagaatggctaagatcaaaaaacccaggtgagagcagatgctggtgaggatgtagggaaaaaggaacactcttccattgctggtgggattgcaagctggtacaacatctctggtaaccagtctggcagttcctcagaaaattggacatagtactaccggaagatccagcaataccactcctgagcatatactcagaagatgctccaacatctaataaggacacatactccattatgttcatagcagccttatctataatagacagaagctggaaagaacccagatgtccctcaacagaggaatggataaagaaaatgtggtacatttacacaatggagtactactcagctattaaaaacaatgaatttatgaaattcttaggcaaaatgatggatctggaggatatcatcctgagtgaggtaatccaatcacaaatgaacacacatgttatgcactcactgataagtggatattagctcagaagctcagaatacccaagatacaatttgtaaaacacataaaactcaagaagaaggaagaccaaagtatagatactttgttccttattagaagggggaaacaaaatacccatggaaggagttacagagacaaagttcagtgcagagacagaaggaatgaccatccagagactgcctcacctggggatccatcccataaacaaccaccaaaaccagacactattgtggacgccaacaagagcttgctaacaggagcctgatatagctgtctgctgacagggtctgcctgtgtcagacaaaaacagaagtgaatgctcatagccatctattgagctgagcacagggtccctaatgaaggagctggagaaaggacccaaggagctgaaggggtttgcagccccataggatgaacaataatatgaactaacctgtaccccagagctccctgggactaaaccaccaaccaaagaaaacacatggtgggactcatggctctagttgcatatgtagcaaaggatggcctgattggtcatcaatgggaggagaggctcttcgtcttgtgaaggttctatggcccattccagggccaggaagctggagtaggcaagatagtgagcagggggaagggggaggggatagtggattttctgaggggaaactaggaaaggggataacatttgaaatgtaaataaagaaaatatctaattaaaaaagaagaaaattatcagtattgtatcatctactgtctgactagaagaaatcataattagcacctctctctctctctctccctctctctctctctcttccacacctccccccacctcaacctcatttttagttgtacagactcatggttgctcattctcagttgcactcagctctgttttataagtagcgttacattattggttgagaattgatttgagtatcatgtgttgttgtttgatacaaaacagtttagctaaactgcctgacattacaacagctggtaatgtcacttctgttaatgtctttaaccacatttttaacaaaacagcagatgctcatcacaaaagccatcttcttccagcgattgtgtaaaatcagctcctggctctggcttgagcaaaatctgactgagtggatcacttgaccttagaaaacacgtttctttgtggatcctgaattatctggcagtcgggacaaaaagacagatgtaaagacaaacaatgcaaactgtgagaagagtgctcagaaaatgtggcaaatgcagctcttggggaagagagtctgtctcagcctgtgaccaccagcagcaaactgagctcaaacgaccagtgctgtctattagctaaatagaattcccatgcctctggcagataaatgaagtcattcgtcactgctttttaatttctagttttgaggaaggaaatccccccatttgctaagcaagccggttttacttacacagagaacaggctttgtgctccgaaacagttacaggacataaattctagaaccgtttccccaggatgattttctgtgtcatcagcatcttacatttagatctttttcctgggctcataatgttccctgcctaatttctaatggtcaaaaggaatagcatgataatcccgctcattcatccctcttgtgggaatgagtgacaaactctaagataatgtctttcggctactctttagctggggacagttagtaattgtaatccaatatgtttgtgagtctcttttctttagtgtccttgcaagtctctttccatcataggctacatattctcttcccactcatcccctgccatcgacattttctttttttactttaaggacttttgcttttgagacatttgtttgtgcacttagcatgcaccaagggaaactcaactcaggcagcacatattcttgtaaggatgtcttctctgcagtcagagttggagccacacagtgtccgctctgtgggtcagtctgtgatgtgagacatatattacgtacttttctttttgccaccacaaaagacctgtcaagaaacgatttgaagccagactggagttattccaatctacagtctgtggcagttaatctattactgtaggtaaattaggaaaaccacatttttatgcataaaacacagtagatctgcagcacatcagcagatatggatgcaaagtttcaaaggtagacttcagctagggtgatgcattcatttaatgcatcaggaggccaatgcaggaagatcacaagtttgagaccatcgtggtcaatataatgaccctctacctcagagcaatacccagaatttaaatgccactaaaacaacaatgtttcaaaaataagggatggtttcaacagaaggccctttaggagattaatgatgacaagagtctcaagaacattcctctaaaatgagcacagtgtccccagctggaaactatcaacatacacttgactacacagacttattatttattccatcagaaagccagcaccatgaagaatgatagaatatcttagagagagggtgtttaagacaatctagacattggttaggttgtgggaaggggtgtccagagaaagctagattcattctgttctcacagtatagagtgtctgtggaaacagtcgtgaacaagatatctatgacttgatgtctcaataaatctctctagggagtacagcctagagttaggcttaaaccattgctagtcttgaaggagcagttactgtcattactcaaaggacagagatggttggcatcttaagagttgagcaatggcctttttatctatgtttagacagagctatgaaacctcttgcttatcttcatttatagtgtctcaaatgacctctactgagttgttggtgtttagggagattgtttatatgcatcaagagaacactgtgcactgggaggggagtggcatccaagtctaagcctaatgaatgtcatgctagctttcagaagcttgaaagcttagcttgtcctgattctctcccctctcccctcccctccttttcctccttctctccctctttcctaatttccccgtcttctttttctcttttctcccttcttgccttctttcttcccagtcagagcaatttcaccccctttgccaggtattgattcagagatgaggtcatctaaaccaatttggccccatagaggtaaaaggaggcgtgcctgtacttctgtaaaagaaaaaccagtctttttcagaaattgagcagagcttagcaatagctactagaacccacataatcaccatttgggcaaatagcctaaaggcagagtttcattttgactatggagcaaagagctcaaaagctctggggccacccatgatgcctcgagtcactatgcctccctgaccttgctgcattatgaaattgtgaccttctggtttctatagccgagaacaggctggctgcaactcaagcacgtttccagccgtgaagtgcaaacatggcttaaaggttatctagaatgcaaactacatacttttcagaaatcatcgacatctacattttctgctctctcccctctcactgttgttccaagcttttccatctgagcctttgctgcctgcgtctgtctgccccacacagaaactctggctgctgatcctaagagctattattattctttcttaagaatattatattgtgtttaaacatgaaggaatattagagaatattcattcaaagccctcaaagggccagggtatcagagctttataaaggtcaagcaccttcttacagagcaactggactttccatgcaacagtagatggctgtctttccttatggctatatggctacttctgagccctgattccttgctgttgggcctgtttcctaacttctattagactcccaggtctggcatatatacacatatggcacatacacactgaaaccattactgcatagaacacatatcataatcaatgtttattcctgattaaaggacagctgtttaaatacagatatcatttcaatcatgtgtcatatataatgtgtcttatgtctttaatatcgtatacaaatgctccatcagttactatggagcaatagcccaataaatccctcacaaggtcagaataaaagctaattggtaagttgaaattgagataactcttgctgcattactggatatgagagcttaggaagtacagaaccctctagaagatccactgcttcctttaacaattgtgtgactgttgacagctctggctcaatgctgtatccatgcattgggaaggattgttggaccacatattaccagtccaagaaaagatcaaaatatccagctcagagtatgatttctactaaattatcaagccatacagtctaagtagggactgtcagtattgaagaaaatacagttgtgtgagcatattaacacatgttaaccaagactcagtattatttctgtttccaaggaaacagttatgaacattaggaagagagtagaggatagtatttgaactattaaaatagaatttctaaaaattgtgttttatatttttagggtgcatttataatataaggctactataattgctgagtctttaactagctttaagacagtttcttaattttagacaccaaaatgatagatcaatattttttacagttctcttttttaaactagaacacagttgacatcatttggtggttactacgcaacaattaagatgaaatttcaatagagtttttaaaactactgtttacataaatgggaggattatgtgttttttggaaactctgtcttgtgccaatgagtaacattaggaactttaaaaatgtcattaagagggataggcttttcatggatggtggttggagtataagttgatgtacagggagatcttattacaagcaacaaactaaacagaatcaaaaagatgctttagccaaatgtgatagagttgagttgcaataccagctcttgggggtctggcaaaggaagtctgctgtgagtttaaggccaggctaggctacaaaccagtcatggctaagttacaaaagctgtctaaagtcacacagatcattttgggtgggagtgagttctgttgcattttctgtgtttagctcagtgtctgtgattggcttcaacctacaggagatacaggagtggggaattaatatcaactgtacaactggcatctactgcttttgcagtgtgtcacataggctacacaaacccacaaactctatagccttccttgttttttagcaccttacttgctcatttgattctttgcaaggaatagatattagtgtggtaactctgctttcctatgcattgaataattcaaaatataaattggcattttacatgaaacaaatgtttcatacaggcataagtaaattgtcatagagattatttagtagaagaaaatgattaattgtgccttttaatcattgtcccattatcatatgaaatagtcatgccataggacccatttcactaatgaaggtttagcaccactgaaagcatatttgcattaatgaagcatcacaagttattaattggaatctaataacagcttggaatattgtaagtttgtattaattggaaacagacttgtagatttattggcaatacacttcttgtcaaattgagtcactataccttgatgagttacaaagaggccatttttgtactggcaagatttcagctctactatgttaattttatttttgaataactaacttttcatgacttttcttatagtaaactgtcttatattcttgataacagctctactatagcctactgagtttctgaccaattcgttagccacctcgtaagagaaatattatggactaaagcaggtgtggtttgggaagcaattctcattaacagcaactcgttgactcacctctccagggagttgggatggttaacctaatttaccaaaattgtaagaccaggaatcacccaggagactagactctaggcaggtatcaaatatctggttagggtaattaaagtgggaaggtctgtccattctgagtggcacattccctagactgagatctcagactatataaagtgcaaggtaaactgagaactgacattcattgctctgtttcatgattgtgaattcgatgttaccagctgcatcatggtctgccttgacttctctaacatgatggatcctaccttggagctgggagccaaaataaaccctttcccctttatattgcatttcttaggatattttatcagagcaacagacaaagaatccagtataagaattatcttcattatgcatcatcagtgtcccagtttatttgctatctgctcgtgtcttcctcacaaggacctcctctctaaaggatcagaaccattctgccagtgctctccattgtatgcccagcacgctgcacaactcagacacacaggacacagtaaatggatgactgaggcttggggaagatatgctcccactatggcaatgagtctgggctactgttgacttaatctagacacgagtgtttcttattctagaagaagaaagacaagaaggtgttcctgtatagtctgaacccccggcaattgagaaagacctgggctttctaacgtttcttaattaagaattttgtgataaccaatatttatgataaacctcaaaataaaatttcttcatagtaattagtgcttttattgaaattaaaacacaaaaagggtttaggtacagttgggcatagcactgagactaaacaaaggcaattttaagtgaaatttatcactcatttatgaggatgggggggtgatcacagggttttgggggggatgtcttcttcctctgtcgtgtctccccatcccttcctcttttaactgcctcagtcctcaaccttcttcttttaaattttgattttctggtgaattgtgtaagaaagataagatcatttcacttggtgccttcagagactgtggttgatagaaagacatgtgcacaggccactagcaaacatgggttctgacctgagctctagaacaacatagctgggagaccaaggcaaaatctttttttttttttctttttttcctaaatttcatctggaagattgagacttcttttggtctgcattaaagaacttttataaatatagccaagcctggcagtggtgacgcacacttttaattccagcacttgagaggcagaggcaagtggatttctgagttccaggccagcctggtctacagaatgagtcccaggacagccagggctacacagagaaaccctgtctcaaaaacacaaaaataaacaaacaaacaaacaaacaaataaatgtagccaaaaataaaagtaaagctatcaagtcctaaatcgtaaggcaatggtaagctgttctgattctcacttgttgcctgtggaagtaatgcatcagatgcaggagacacaagtcagctgttagtttaaccatgagcaatgcatcatttattataccaagtgccccagattcgctcagccttcttttggtgcattaaaaactatgctttgggatgctagagatttagcgcaagcattatattatttgctgctctggtataggacctgggttcagttcttagcacctacaaggtgactgacaacaatccaaatttcaggtccaggagatccaacaccctcttctgaccttggcaggcaccaggcatccacttggtttgcatatatacagtcaggtaagacacttttatacataaagaaaaataaacaattctaagtgttcatttgatacttttaaaattgttgttgaatccaaaaagttaatataagtgttacctgcgattgtggtgttataacattataatatagagaccgccaaatcagagcagtaacataaagtgttttgtcataggaaagttataaaaattctgttttttaaaggtataatatctcctgtgctcaaggatgatactactggcatccttactcccagaaaacatgccatgtaaaatacaggaaggacagattgtagaggattgagaaggaattcctaagatgccattgtatagtgcttcctaagagaaaagtgctgacaccctttgtgggctgtgcctggctccttttcctttgtcatatggtagtttacatcattttcttaaaatgtcttgattcttcctgtagttgaatacaagttattaagtctccatttttgtatcatgtaaaactgcctgtggctggaaaactgtttttttttgtcttcttttttttaaattaggtatttatttcatttacatttccaatnnnnnnnnnnnnnnnnnnnnacccactcccacttattggccctggcgttcccctgtactgactgaggcatataaagtttgcacaaccaatgggcctctttttccactgatggccgactaggccatcttctgatacatatgcagctagagacacgagctccgggggatactggtgggacaaatctatagggttgcagacccctttagctccttggttactttctctagctcttccattggggatcctgtgatccatccaatagctgactgtgagcatccagttctgtgtttgctaggccctggcatagcctcacaagagacagctatatctgggtcctttcagcaaaatcttgctagtgtatgcaatggtgtcagcgtttggaagctgattatgggatggatccccagatatggcagtctctagatggtccatcctttcgtctcagctccaaactgtgtctctgtaactccttccatgggtgttttgttcccaattctaagaaggggcaaagtgtccacaatttggtcttcgttgttcttgagtttccttaccctgtgcatataccctgtattttaccttctctgtgggtttatagtttaagaaagggatcaattaatttttttctatgtgtttaggacaatatactattattattctaatttgtgattttagataaaaatgtaatgatttgtttaattgcatgctgtgcatctctgtgcacacatgagtattgattcctacaaagagatacttactcatagcatttttaaatcaaattccctgatagaaaaacttttaaatacacacgatatttgcaatcattgtgctgaggattgaaccctaaatcttgctcatttcagtgaatcagactcccagtcttacacttgaaaggtctgaccatttatttaaaatggatcattttatacaagattcaatttctcctttactgattcaccaacatgttatcgatcaacttgtgtagccagcatcttttctggtgctactgcaacaaataaaacatagacaaatcttcatgtccaagaagactacgtttcagtggatagtagagggtaccaaaagaaaggggacaagaacagtgaatttttggaaagagatactaatttttagatttgtgtgtgtgtgtgtgtgtgtgtgtgtatgcatgtgatatatatttgtgttgggatgtgtgattcatgtgtatgtgggttgtgtatgtttctataaggtgtgtgtatgtgcgatatgtatttgcatcgagtgtatgtggtgtgtgcttgtgtggggatttgtgtttgtatgtcagtgtataggattgtatgtgtggtgtttgtggtatgtgtgcatgtatgtgtttttatctcatttgtgggaacacacatatgcatgaatgtgtgtgtgtgtgtgtgtaggtttatttacattgagggaggtgtctatagcttagaagagagtgtcatattccctaatgctggagttacaaatggttgtgagccaccctactgagttgctgggaactgaacacaggccccatgtaagagcaatatacactctcatcccctgagtcattgtccctgcccaaagataataacttaaatgaggtatggaaaagacttgttgaagaaatgatgcttcagtatgaactagagtgaagcagagttctaacacttttgcagagcctgaggcctgctggcttctcttctgtacttttgatattttaagagtcttcttaaaccacgagggcttcagccttgtgagtgtattccaggaatctgggttgcataaatagacatgagtctcaagtggaaaagcccttcagagcgtggccaggagtttgtaaggggagaccggggagactgctgcagtgcactgccatttgatctctctttaaggatttcctggttgttgggtaaatagactatttgggaggaaagtcagggaaaggtgagtttagaggcttcgagagtgactcagagaaggagtcgttggcttagatttgttgctgatgttgggatttgtgagaaatgatcagaattttacatcctttgaatatcctgatctatattatattcaggcatatgagctaatttgctagaattcccatcacatgatgattagagaattcaacttttagttaaggcgtgacttactgctctttttttttttttttttttttttttttttttccatggggctttcttttttttttctttttttttttctttccattttttattaggtatttagctcatttacatttccaatgctataccaaaagtgccccatacccacccacccccactcccctacccgcccactccccctttttggccctggcgttcccctgttctggggcatataaagtttgtgtgtccaatgggcctctctttccagtgatggccgactaggccatcttttgatacatatgcagctagagtcaagagctccggggtactggttagttcataatgttgatccacctatagggttgcagatccctttagctccttgggtactttctctagctcctccattgggagctaagatgaaaggatggaccatgtagagacttactgctcttaaatctgagtaaatacattggctgaggcataaatgcagaattacaacagtcccatgtccagtcttcttcatgtaggatcttttagacactttatgctcccacttcaaccttatgatgagttattgaaagcttttaggtatgttacataaggaaattgtatttcttgcttatttccttttgtaaataaaatgtaaaataaaatgattgaattgttacaagttaatgagcaaaaccaaaaaaattccatgggagagacttctaagacagcctaagagactagagcccttgatatatttaaacacatttaaaccatagtgagaaattaccatactgtggtccccaatttctcatatcaaaagaattgcaaatatgtcctgacaggtgttgacaatgtggctccatcagaagaaaaacacaggcttattttgctatgtctctgtgacatcctgtggttaggacagtgcatgtcatgtctccatcctgtggccatagaagtatggtgcttctgttgattccacagggcatgagttttcctcagtaggggtggggctctacttaaagcttacagagcaagagtatggatgattgggtccatgcatgatgttaaatttattcctgaaaagcaggaaaggtactatgagggtcacaaatgtttgctcttctgtagactcagggcttcctgtcctctggcagcatcttccagactgtggagagggctcagtcattaaagagtttgccattacaattgtaaatacccgagttactcatgtaaaaaggccagggtacagagaaaatacctgttgtcccatcactgaggaggcagaggttttaggattcctccggggtattctcatcagccagtctagccaagtcattgagctaacggttagggaagaaaccctatctcaaaaaataaactggagaatgatttaggatctatgcacatccttcacacatatgtgcttacacacacatgggtacaaactataccacacagtagacatttttccaagtaatttaatgagtttaggccagaggtgctgcatatattaatggaatagctacatagacgtcttttaatattcagacacacacctgttatcccatgtgcctacaattatttttcactatgtaatgcaatagaaggtttagggtccccccatcttcaaacacttgcctcatctttgacctgttcatagtcaactgatcctatttcaaatatgttaatgtgttcacatatggcaagccatgtgatatgcaactccaggccttgtcagtaggaatgctgtatgacactgctccactgaaagggctggaagtttgcattgtttctccctagctacggcaattgtagataataccgtattccttgcgaacatgatcatcaaatgataccatttcagacatttccattgggcacaacagacaatatttgacggcttcatttcctgccagtaatctggtgtagggcatgaaagggaaagtttccatattaactccctatacagaggccactttaccactgaagatgcttagtgacaactgagtcagtcagagcccctggctgcaattttctgctgtcctaattgtggcccggctaggctctcaaataccatggcaataggcctaaaaccatgcacaaatggtcctggatttgtttaactgatgccattcaccaactgctccactctccctgcagcactcttcagcagccgtagttttgcagctggcttcactgggtgggaaagaaaaaagtgtgaaaggggttccttttcttaaggaagatataattaagttttttttccctctatttcaatgttatttccttctcctgaatagctaaacaaataagatttttaaaagtctgccatcaggctgggaacggtccacccagggtaaagccagagcaggcttgcattttctttgtgttctgctgggcagactttcacctgtgtattgtgatgccagctgtgttggagacagatggaggcacaggtcctatggagcttacatcttgttcccgctgtgtctcagtttgatggcaggatacataggtttccttctaaacccaaagccactgactggggtctcttttcttaaatcagaaagacccacagttgaagtgttcttattctaaatctctactaggtcttatgttcagttcacaggtaagattatttctgcaaaaaaaacaaaaccaaaaccaaaacaaaacaaacctaaacaaaacaaaaacaacaacaaacaaacaaaaacaacaacaaacaaacaaaaacaacaacaacaacaacaacagggaattcaaagcatccagcaggcttgctgtcctgagagtggctttgaaatgctttgtttgtcttgcaggaggctttcccctggttggactcattaatactcttttgtgagcactgttttgctttttccaaatagcttctgctgcacagcttcctctggtggaaaatccaatttagttgcaagcagcattaacagttccgctccttcatttttcttcctcggtaacagaaaaataaaagattgtgtgtcaaaatgtagatgtgagatgtacgacattagcagttctattaataaatttatgcagcaattatttagcttcactatttgtatttagccaggactgaagacggcttctctatattgtagcagcctatttgtcatccaaatacatttcattttcatggatcttatatctttggcccaaatttttactgcatgtggacacacactaggaagtcttaattgtataatacactctgaaaaagtaaacttcaggtgcatgtttaattagacttaattgaaagctggagttaatgatatttacctacaatttttttccctccttaggagactagaatttcccccagttcagataagttcaccttcatccacatgccccgagggtttgctgaagcctgcttaacccctcgtgggcgctcagaatattcccttcctctgctgcactattggctgttgagagggcacattcaaagtcaatgtatatagagctcttctggcacagaccctgcaatgaaattcagtactatgcagaataaaccttcctgagaaacaaatctaatggaatgcagatgagtgaagagagggaagaagtaaatttatggtctcatttggttgactacgtggatgtagtaatgctggaactggcttgtactacgccaccatagcctattgttatggtttcatgattctgggtactagtcaacatcaccatgttagtagttttaaattaaccataggctaggacagtttgtgacttctgtttttaagggagttatattaaatatttaccagacaccgatgcctataccattcacagtgaaagtggcatcattcaggtcaataagctgaacaatggatgccctagtctacagcttagcaccctccccttttatcattttgcttgttactttgagttagtttgcaatcatatgcagctgtaggaactccggtttggatacatggtttcttactgttattttttttaaagatttatttattatacataagtacactgtagctgacttcagacacaccagaagagggcatcggatctcattatgggtagttaagagccaccatgtggttgctgggatttgaactcaggaccttcggaagagcagtcagtgcccttacccgctgagccgtttcaccagcccggtttcttactgtttatgctcatgttacgagaaaacactttcgttagtgtcatacgcaaggaaataatgagggaattaatgaaagctttgaatactaagctgtcgggtacttactgaatattaaaaatatttaaccgaggatctgaaattcctgtaacattttcgtagctgatgatgagaggtcattcaccaatagcacctggtgccttcaaaagagaaacaaaggagcagtgggaatggcttggcagcctttggctcccatctaaggttcacactctttggggggaaatcaagtaacatggcgtttgaagatggttacagaagtgattttattttcaaaacacagtcatccagattgagacattccttcgtctttaacagtcagatgcaccagtatggcatatggagtaggatcgcctttttattatttgtcttgtgaactcgaagaccacatcatttgctggcaaattttgaatattctggatcagaaagccatctttctaaaactgcatgaatatggagaagtctcaaatctttataatgtgttcaagtctgaactaaattgtagaccaaagatattggagatgcttatagcctgagtgctatgggcttggatttaattcctcatgctttgttgctggctattatcatgtgccccacatgccttcatgaaaaatcattagacaaatttgaaagctcatgatgaaacttctgcataatttacatactataaatgtagatatggagactgtcatttgtttgaggtaccaaaatcaagagaaacagaagtgaagagaaattatttgaagagccacttgtgtgcacacacaggaaaatttccggtgactacaaaggctgtgtattgttttcagtggaacagaattcaaagggaaaatgcactgtaggttgctcatctgacaataggagcatatgatcaggatttccgatgggtcagagttagttaaagggcaatgctaagggatttagtaaaagacttctgaataaacccaaagataatatcaccagaattcatattttctctcgaaagcaggttggatgtatctgagtgcatctgtacccttccatttatttacacaggccttgctctttgccacactattttccaagaccatttcagttatttaagaattaaaacttagaataattaaaaagtattcaagacttctctaaagcttatagtaatttagtgagcctttctctatttcattttgcacctttgtttaagggagcattttttgttttgttttgttttgttttactgttatttcattttattattattattttaccacaagcacatctcctacctctccaagattcagaattatagacctatagcagccaaaggcaaagtgggttagggaagaaaatcaaaataagtatatcttttgaactacactaaaggttcaataaattaaaggaaattatccatacctactgttatacatagtgactaagacatataaccagtactattgttattgttgctattattattatttcttattttttaaattatttactattgagcctcagactttgcttattagcatcattaagcaaggagttaacattatttgatggtttgagtcatgctttcttacttcatgtcaaagcatccccaaattctgaagcttaagcccaaggtcatgcagtgttgattttgttttggtgagtgaatcatttggggttttgcacagtgctgcagtgtctgactctgctttgctttccatcttccttctattggcaagcagactacctattccattgacttctattgtcctggccatgctagaggtgcaacaaggccagaagacacatttgatacctttttagataaagcagaagtaggacacgtcatcacttccacccacacgcctatggaaggtctcatagccaagttgaaagtaaagcattctggtatctactttgtcactgagttcctagaatggcacacaggtgtggatccaaagcagggaagacaatggaggcaaaaatactgtcttctgtgctaactaattatgtggtacatgtattctccttagtgctttgtgctctatctccagcaaaataattgagtgcttcccatcggcactaaaagctgctgcaaatccagttttcttttgtgagctgggatgcctgaaagtctaacgcacaccattatcctatgacagcagccatagccttagaattcttggcattttcttattcttagccttttctttatctatatcctttatttaattgttcatttaaccaattttattaaaattgtgttattttctcctttgtgggtttttttttaaatctttcaaatcatttctagtataagaaagaagaaatataatagtaatttgagtgacaaaccactatcactgttagatcccttacttataagtaagatacaaacagcattgcaataactagcatttattgaccattccttcttgtcttgggatgcaagcagaatggctttgaagtaatagtcaattcagtttcccaaacaatcttcggatgtatgtgctcatattatgttatccttacagaagccaatacagttgatacagcttgctcaggtcttgcagctgataaatataccagagctatggtctgagctgtaaagtctggctttgaatatcacattcttagccactaagctatcttccctgcaaccgatgcactaaaataaaggataaaatgaaatgggtggtatttcttttctcctctcctgaggcctggagtcaacttttatcacttgcttatcttttattttgtctgttttatttttgcctgtatctcttataaatatttctaattaaatagtcatctgctaagggcttaaaaatactgtctaagctgtgtgacatttggcattccaatggctaggattgagtagaaaacgttaagaatccaggtcaaatgaatctgatttatgaatcactgttagcagtgcagaaatgtttagcacaactgtcctcgtatttatgaggagcataatacttccaggtacattttatgttttctgcagaagcttggtggtaaatggagaaattaaactggaaaatatggagaaatcagcagaataacacacacctgctcaaaacattcattttattgatttaacagttgactctttagggtatgtttctggaaacgttggctcttggcatgaagaagtattctctgtgaatgaattcagtgatgcatcacttagaaactgccacaccgacagccttttaagcatctcctatgagtctgaatggcgaaccaaggccgtctggggatgattgacttcctcttctggttgcggggctgtttttgctctgttgctttgcttcctggttttgatcttgcagcatctcatttggctcaattatttggaaagtcttcaatgatttttttaatgagtatcatgctgtctcaatatcattaattattgtagagctacattggggaaaattcaaaataatcattttctttcaaatcatttgtaattcccataaccctgaagaactctgaagcagtcttggtaatgatcatcttcctattttccattaatcaattatctgtgaatgtgtataggagaaggccttgttgggttttcttttagttgtcttaagagaggcaatgtaatggctatctgtcttcccagtgtcacctctgagaatgtcttcatgttaacttgtggacaatgatgccccaactccaaactcttttcttctgcttcagtcattgaaatcttcaatgtttgtgtgttaaaggggaaaaaaatgaattctttttaataacaaaagacagaaaccttgatataagtaaataataaacaaacaaacaaacaaataaataatgcaggttcacaggcaagcaggcaggcatgtgaacatgttggcttgtcatagatctcttctgttggcttctctcttacttcatagaactcttctgttttgtggcccttgaatatgttaatacctgatcatcttgataccagaaacagtatctcattagaaagagagcaagttttctatattagctcatagcagaatcccaaagacagctctcattgatccagccaggacacagttatgtccaacttggacctcaaggctgaggtaaagcccgatgtacgcctctatctgaaggaggacaagtgatccctactggaaaactggggtactattttcagagtaggaaagtgaatgcccatttaaaagcaacagttttgtagcactgtatacaaacatacaaaaattatttttaattatattagctgcctgtaatctgtagtaaagcaatatttataatgaaagatgcctcaggtagacaagagcattttccttttgaatgtaaataatcaattgtggattagtctacaaaatgcctcatttaagaggcaatgccatatatagatagatacttaatgagtatttgttatatgccagacctttgggtgaaaatgtgaaactgtgtatctcctccttgctttctccctccctgtccagggtagcagcagaacaggcaaagtatgggtggacaaacgaagagctgaagtctccttagaggctcaagagggacatctggcagacactgcttctgagctgacctcgcagacgtagcaccatccagctctctgtgcctcttcagccacatccctgccttaaccctggatgtgttgttactctagttgtactaatcttatttcagttttcttattagtcacttcctattatggcccacatacatttacccatacatttatccatacatctgtacttgccttactcatggctcttcgtttacttaggagtccctgttgggatggtgcacatgctgccaagttacagtgactggggcacagtggccttcagagcttttcttgagtcttcttataatgaaaggcaagaaaaacaaatactacattccctataccccctcatagcctgaacttgaaataggattccttttgtgctagttaagttcatgtgtttcagaagtaagaattgaagcaaggtggtctttctatatttatgcagttcctattgtttaaaatatatatacatatccaacttgaggccttggcctacatgtgtccttgggataggtaggtttgtagatgacagtgccatgttgcaaagttaaaaggttgggagcaccccgggaacatttgagaagattaagttttactgtgaaaagtactatgtaatcatctagttaataacttcaaggttactgatttacttactagtgtggcttttctatgccactaaaggttgtatcagtgacagccactgccttctgtgcagacatccatcaaaccatttccattatccatgtctttgtcatgggcatcctgactctctaccttcttgataatgacagaagtggcaacagtttctgatgagctcttcagggtccttcctaggactaatgagcgcaaagttcctggtgactttactgtatctcttctctcagttttctctccactctgtagtgagcctcagacttgtacacataggcatcccttcagggcttcagtcctgagaaacttggagagtatagttgataattcttgcagttgtcctgaggatgaggcgaaggagatcctacagggatcttaggctagtgtagcatgagggagttagcaaaatggttgctactatctagtgtgaaatttgccagcattgccaatacaattaaacatttgtctatctgaaacatcattttagtgaaaatccctatctcttatgctttttctcagagaaagaaaagaatgtctgttttttaaaattgctgctgagctttctatagtattcatagctacctccaggtagcttcatattcctttggtactcagggtagatgctcagtgattcacgtggttcacatgttaggtaaaagtgcttgttgtctgcttttctcagtgacactacatcttgtgattttacacttgttttgaatgcatttaaagttagaattctcctacagccaaaagcccatatgaaaacatgaagcgaggacccagttttactataggattttgttctgttttgttttgtttgctttgttttgttttttgttttttttttaggttttttgttttgttttgtttttgtttttgagactgggtttctctgtatagctctggctgtcctggaactcactttgatttaagccactgagaatatggatacagctttggtcacctcatctttaaaacagatgtaataatttctgttgctgcatctaactaggaaattggggatacttctattcatgtaattgatgattcaaaggtataggtgatctgggaatgacttgaccaggttagagaaccttcagacttccagaccattgttcttattccatggatatttattcaggatttttttttctttaaattaaggacagtcttagtgtttagctcaagttgactggtattaaactaactgtggaatcttagccaaattaaaatatataatctcccttcctaacatttagtattagaattacagatgggagctgccacacccagctgagagtcccttatgtgcagagacagcttacgttttttatgtgcactctcacttttgcttcaggacacagttaatggtagacacccctccccccatttttgttttctttgctaatgatacggtgcagtccacttgtcagaagggatggtgacctggtgactcttgccttcagctctccctttatgggcacatccaaagagtttacatttcctaaatgagtcttcgatatggtttcctactaagagaataatgctatccaaagtaagacccatatttcccccagggaaagtcattctatgagcctctactccaatctccctcaagctccactccattagtatcaagatcttgcctgagtcccatttaagatatgaaaccagctctatgagccctaggctcatgatgccagtgtgtggatgactgacatctagctacccagtcatagtctttgtggagtgacagttgtgcatctcagttcatcagactttactcatcgctattttccaatgctttggttgaatagacaggtacgcttctttctctttctaaagggctttgtgtatttaatctatctgtgagtgtgaatgagttcctgggcaccatatgcatatagcagactgcagaagccaaaagagaatgtcagatcacctgcatgtgtagttactggttggtcacagctaccgtaagagttctaaaacccaagtgctcttaaccaccaagccgtctcttgagcctcagacatatgttcttactaagatgacattttagcaactttcgtaaaaaccattttgtcatccaagaggtcgcctgccactcatcaccttcactttgcattgtgaggtgacatgagaaggaaatttgtttttccaatgttatttattaactgtccagaattgctgggcaacaaggaaagttcttatcacaggaaaccatcttgccctagggaggtgagaaaccattggagaaagcttcttcagtgttctcatcagtaactaactgtgagtcctgtgcatttagtggaagtgtcataatttgtcccttgtcattatgtatatattttgaaatagatacttctttaatgatacagtcccttagagatattcttgatagtgacaaagggacattccctataacacttgcctggttaatgttcttttctaagcaactccctcggttttatctgccacatcctattgaatttcacactagttgtcagtataaagagtgctagaagacacagagcaacttcatgcaaattagcaaagggcattgcttctgtagccactatgttttcccataaagtccatggccttgtaaaaagtagtggccttcataagtccctatgcattttctcatgcaaccaagaggcaatgaagtcatcacggtgcagcataggctgctcacagctccatggtgccaatcccagtagtacaatatttaaggtcatgtgttaaatataggggaatgtaatccttggtatgtgaagagttccaaccagtacaggccaggtgttgctgttttctttctcaggacaaagcaatcaaaattgggtttcattgtgtcaaatctcttctttccaccaaagttgaaaggcattgatgaggaaggaaggctgaaagactaaaggttgcatctattcaagcaaagaagcatgattaaagaaaaaagaggaagaaaacctaatatttgaaggaaagtatctttctgattccaggttctgagggcagagcagtttctcagctgaacagtttgctctacccagatttttcctttttaaatttagcctctgcttgatacttggccgtcttgtgccctgtgattctgtttctcttctttgcctggtccctggaggccttttgagaatgttacttaccctttacctgctaagccctaggtgctgatttttttttttttttttttaaatctgatacaagtaaagaaaaggctccctttgaagatctctggtttggaatcggctcacttcttttgaaagtattttacatttgtctcattttctactattttccatccttagctttttacctagtgatggcattcctgacttaccattttacttgttgcagagtcctccgccattcttgggttgtatgtttttccctaagtagcttttcttttctgttttctctactttgccatctcctggcttctctgtttccttttcttctttcctcttccttcatttcttttttcactccatctcatcccttaagccccgtccacctttatcatttcatattaactgaatgccttctttgtacttcggagattatagagaaacaaactctaagctgcaggtgaaatgatatagtacaaaggtcacagcaatacaactgtaaaattcaaggtatacatgcacacttatgcacacacacacctcacatttaaggtcttgaaataaatggtggtagatggtaccgtgtgtgtgtgtgtgtgtgtgtgtgtgtgtgtgagagagagagagagagagagagagagagagagagagagagagagagagaatgtatttgtacatctatgagacaatcaggaaaaatagagacaaaacctagtgttataaaagagacccttgcaaggtgtatatatgaggtcaagcttaatatcatatctatgagtatattatatatgaacacagccattgcagtgtatatttgtgctctctgtgagctatctaagtacaaacttatgaaatactatagtagtgtgtgtgggccccatgcctagaaactgaatttctactcattaaatgtttcattggctaaattataatgtgatctaagaataactgcatttagagttatcacgtggaacaatggggacaaatctcttgagtgtagagtaagatgttggttgaccacctgttctgagtgactttgtacctaagagaccgtattcaaactgtgaagtgtgacaaatatacttgagcatttactatggaaatatggctttttcattggtattttgtcttatttctgttttggtctatatccattaaacattaacttatgtttaaacacggtttctccagaaatgcagctggattcctcactgaggtgtgcttccgtgcatgttttgagtagcatctgttccagacagatcacacttaaaccaatttttcaggcaaaacaagggaagacctgctgcatcacagtggtggtaaaatcagcctagaacaaatagttgatgcaagaattatctgccataatgaggacctgggtttccagctggtttggagtgtgatacaaggccaaatggcaaccaagttatgggattttctatttgttgagggaggggtgaaaaaaatcatgaaaatggaaactgtaggggttttatagatgctgttgaaatagttataagtgggaagtaacctacttttagatttaggtcatttaaaatgctgccttttttaagattaaaaaaaaaaaaaagaacagggtagctacgatgaaggtgagagatgggaagttagaagttagaattgcccagtgtgtgccctactttttttgtgacccatgctacacagtcagtgactcgggcccttagagagtaccactttccatattggacagagatggggcaggggaggggttgaagacagaaatcaaaggaacctcactacttctgatgacacagatttgctctatttactaatgacagtggttagaagtaggcaagaaccttaagatgcagaacaacctcctggtcattcattctcctgtcctttcatctctcccctcccctgtccttcttttccctcccctccactcacctctcctctccctacctctgcctcttctctgattttctactttatccatctggacaagaagagcccatgaaggggtgtagcaggagtttagtgggcttcgtactgcattgcttagggtgcaatatttcctctccaagggaaaggtggcagagcagggagagcagggcagggcagggtgggtctgggtgtggtgtagtggtgcaaagcagagctgagctgggctgtgtcaggcagggctaggcagggcagggctgggcagggcagggcagggcagggcagggcagggcagggcagggcagggcagggcagggcagggcagggcaccagagaacaaatatgtgtcatcagaaagtagtgaggctcctttgatttctgtcttcaaccccctccccctgccccatctctgtccaatatggaaggtggtactctcatagggcctgaggaaggcctgagtcactcactgtgtaggctaagcatattggatctcttaggctaagcatattggatctgagagtacctgggatttgtgtgtcctatacagtcagtaccagtgctcatgtcttcatccttaagtggttgaaactctaggtgttttaagaaccacaatgatgacaaagaccagatagtaaagaccattaagttgccatacaactccactgtccatccactttacatcctggtttcatagcatgaatatgtcttttatatttctctagatacaaaatcaattttctttttaaaaaatctgttctgggtagatggttacatattaattccctcagttactctttcagaatctcatttatctccagcaatctaactcaggagcagattaatgtgtggtgttcttttaaatattgctcaaatgtaataaaatttgtttgatggtgactttaagcagtaggaatttcagtctaaaaattttcagtctactctattagtgttgatcattctccagagtttcacttcatttacctgagcttttgaatacagatgcataaaaatcagtgtggaaataagctaggaaatagaagcaaaggaggggatacctagagcttgttgatcaaccaacaacctcatgaaaagtttcactaattcattagtccttgttagttatactgaacattctcacccattcattagctaatggacatacattcaaccttgaaagtaccttccaaataaggatgatatacccaatatgctgaaagactatttctagtctccattctattgctgtgtcaaggactcaaagtcatgtttatccaaatttttatacactcacaccccataaaataaaaatgctgtgatgttgtggatttggttttcttttcactccatgtttgattactgaccatatagtttgagctaggcttggaattaggtgcaacaaatgggccttggggaaggaccagcatcctccctacctttttatggtttataagatactgaaagaagaaagagcacacacacacacacacacacacacacacacacacacacacaccccacaaaatgacataatcatcactgtgtccactgggaatgagccttcttctataaaagacacagagcgtgacaattctcttaacaagttgataacatgtcaatgtaatgattttgtcatacaaatgtaagattatagttctgtaaatatgagtatattttgtatatataagaactttggaaacctaggtagtatagctgcattttaagcaaacatgctagatcttaacagttccctttcaagtgatttggagagagggaattatttttgaacaatgtgacttagtattttctgttgctataacaagatacatgaggcagtctagaatttcaggaaattatagggtgtctgcttatgtgctgcttgtgtatgtgtgtgtgtgtgtgtgtgtgtgtgtgtgttgggggggcatgacatctggaaggaaatgatcaggggaagacagatatgtgaggattttctcaccataattgatcctgtgagatgggggagacctaggttattactaccatacgaccactctcatgggaactgagccaaactcttgaaaacaaacaaacaaacaaacaaaatgttaatctagacatgaggatcctgctcttctgggcaagcttctctatgctcaagccccacttctgtaatgtgccaccacctctcagtatagtcactccaaggaccaaatttacagcatgagaatctttatgttagaggaagcaatttggagtgacacagagaagcccaaaggaaaatacagaactacttgaggctaaaagttttaaaaagtaaacatgggaattgtggatagtggatagtggaaaaaggtacatctctggattgaaaacgaagtatcattaggaagatgaatcatgtaagaattaaagtgcaatacattctgcaaatgacagaacaaattgtgagtccctaagaacctaagactgagctggtttctaacccaagaggctcttgtgtttctttgttttcaatttgatagtaaaataaaactgagaagttggagctgaaaaaaaaaaggtcaccagagattagcaaggtatacgtacacacacacacacacacacacacacacattcagggttcttgagaacctgagagtctggtttttaagaacagcattatacagtctgaaaacatcttcaacttggtttcaaaatgccttggagatgtataggacctaaaggttattaatataaattctagaggaatacaattgttgaatttattcaaaggaagccctaacagaggcagtttattcagaagcaaagccatattttgagaatgaaggactgtgaaagaaaggatgaagtaactagcaagggaatgtttcagatcaaggaagggtccaaaatgacatagaactatatttagagaagtgtccacccgagtgtctgtccaggacaatgccatgtctacagtgcacaaggaactgtcaagagcttagaaggcacagaggtgggatggccatggagcttgctccaacagaactcacggtccaggcagaatgatggctttgatgtacgtacccattcttttgtgtagtgtttatggagtgtacacacaatgaactgtgtgtactccatcttcagtcctggtcatggcacctttcccacttgtcatttgagaattactctagcaaccagttaactacaaagtaactcctattcctttttgaccaccctaaaacctgttcctgtttcatttaaaagtaaaattctgtcctgttggctatactatcttgaacacctgttctaatatctagtccatattgatcactaaatgactatcgtctttacttattgaagtaagccttaccttctaatatctatttattatcttaagggaaggctgggtaggagtcgagtatgtgtacactctgtgcatgtgagcatgctggtatgtgtacctatatccaccaatggagaggccagaggatggtggcaaatgtcttatatagctctccagtatattcctttgaggcagggcctctcacaaaactgtatgtcactgtcttggctagggtggctgccactgggtcttctaggatctaactgtcttctccttatctcaacatgggttaaaggcatagacaccttttatgtaggtactagggattcaaacgaaggttctttatcatgcttgcacagtaaggttccctactctttgatctatctctttggctagctatatattcatgttttacattaaatactatgttttgtttcaataatgactcttaagttattttgaactcttagactgaattgaacaatctggaaattcaagtcaaaggtttagcagcatttgaagacctttctaacaccaatcacaagatgctcctatttaaacctgaaaatcatatgcatatagtttctggagagtatattagtgggtatatgatcttgttgaatcagaataaggcttatgtcaccaagagtttatttaaaaaaaaaaagactagtagatttatgaagttggaggaagtttcagagcagggtaggaagagggaagaagttattttcatcacttgcaggagccatttatagtcctgtcatcttttctgtcatgaagattatcacttaattataagataacatgatttgctgtttagatatcagagacagaaatgtgcaggctgggatcaaaggagaaatcaattctcagagggtctgggtactaattaataaagttggagcagctgcgtgcctgtcagcccagtcagagttggggtgtctgtttttaaaacattgcgtgggttgagatctctgtcctctgagatatatatcatggctacttataaatcctgaaggggtagcttgcccttttccatgcatgctcattgaagagttatgccttatttaaccctgtaggactactaagtcccagggttctccaggagtatcacccattagatccttcgctagtcaacttgcatgtgaagctagaagggaaagaccctcatcaagaagtccctgtagagaggagagcaaaaaggggaaagatgcatgtgaaggagccagagaccatcagagtgctttatgaatactaggctcataataagtatgttctaatttaatgtcataagtaattggaagttggattaaatctagcaatttggagatattgttttcttagtggttctctttgctaagctttagaaatgatggcgtcataacgtggccagaatcttggtcctccccggggtctccatgcctctgtctttaaagtggcttgcacgtgctgttttaaatgatctcttcagattgtgaagaggaacctgcagggtccgggctatgggatcctcctctctttcttggcttggtagctttttcagaaaagtttcttggaggaagggcttgtatcccttggtgggctgttgagtcgatttagtagtcttggttttcttttggctagtggttgtgtaaattgctacaatgctgtacttccaatgaatctcaagaattacataaaaattcagtaaaatatcaaaatgtaagtaccttcataaacttaatttctgatgttacctggagtaaaataagagccaggtgcatagccagcctgacagtgaactctgcatctaccaatgtatggatgctcacactcttcattttacaaatgaattgaagtctagagagtcagggtgataataaatatagacactggtgttatcaatcaatatcatataaaagtaacattcactaaacagtcaagcctgagaatggacaaataaagcttgtttgatgaaagaacgttttatgctgctggtagctgcataggattagatgacattttgagccacagggatgcatatcaacaacatagcacggtaaaccacactctttattttctgataatttttaaagaggtagataacagttaccttagcagtccctattccacataaatgtagaccaagcatgaccatagaagctcataaatgaggaggcctaaaggtatgaacaaatgaagacaatcctgattttattttgaaaaataggcatattgctaatgaccctgatttcagagcagatagcaaggagctcaagaaatcagccttcatgggacagcaaatgacagctcattcacagactcatctggtgactctattgggtagagtgttcatcaattcttaatcttaatgtatttttcttgataaaactgagagctcaaataaaattgagtgactgctaggagtagatgcatgtaacaagtgtgtttcactgtctcttggtccccaagttcactactgaaatgcagcaattccgaaccattttaatagctcttaatctacttaatccactaaattcaagagggcactgacactcttctgtgatgataaagaggaagatttctcaggtggagctgttacagccatgacagtttccctactgatggctgaaaaccctgtgttaaagaatatctgtactgatgttactacattcattcttaattcttttatactagggcacagtgttttctatgctgcacttaaggaactggaaccagtggcacatctatttaaagaagagcctttccacatcctttcctcaagcttgtgttgacaaactttattcagtctcttagacatggataattccaaagggttattaagagaatggttctgactttagaacgggtttgtgtctttaagggtagttttcagcaaatgagccgaccatatgttaaatcaaatttaacatccattatgaaacactggatcatgctttatatctcagtaatgataacaaatgatcacttatctcatgttcttctcatttgtactcttctcatcaatcttgctaatattgccaaagatttattaaatgaacaagtacccaactgtaactgctaatattaataggctccttttatatttttctcttgctggcttccctttccatgcttgcttaagcccacttttctataagctttaaaagtaagagtttttcttattctgaaatgataattaacagaatactgggaagtgatcagtaaaattattttaatgaaactgtgcaattacaacagcccattgtaagtcataggatttgctatgcactccaagactgccagtaaaaatctttttccccttctttttcttcctattctttttaaaactagagtaaaatggtcgattttaaaactctagaaacatttcagatcccttataacttaaaattgctacttatgtagtaaaagtttaaatcacttgagtaaatttgtaatttaatcctttaagtttaactaacatttattcttctgccctaagtgttttctgctggtgtaaatgataagaagttgccaagttttcaagactttactgtggtcttttcctataccatttctacaccaatgacttctacgcctggcttctgcagcagcatctcccgtgtcctctctcctctatgtctacgccaatgacttgtacgcgtggcttctgcagcatctctgacctcccatgtcctctctcctttgctgatgttctgctttccttcttctctgtgctggactgaatgttcccaggcatggaatccatttcccataagatgctcccgaggtttttaaatctaaacagactcctactgggtgagcctttacctaatccttaggtaagctttcacctaaggtttccttttagatctgccttgtgttgctgtattcctggaaaaaattattcttactcttccctcttgactcccaggctaatgccaggaactcagatattccggggaggcaaggactgagaacaagttgttcctactgtctcatagttacagctttgcctcagataatatgtgtcaaatgaaacaactataaacgagattccttgttaagggaacatgtgaagctgtttatattacaataatagcaacagctgcaatgaccaccccttgactattgaagcaatgccccctgcaccccacaaaagaaagaggatttccccaggaatctcatgctgggggaagaaaaatgtaccagcaagaatggtgtcttgtgttccacaaagagactccacaccattttatcaacttgttatctcacaacgtaagactgaaacctgggcactgatgggtcagtgttgggcaggtcccctctgtgaccaagagtgcttacacaagcatatccttggtcttctgtttaaactttaattctactttaggctcaaaagatggatgtgaggttcccttgatctcttttttcctgtttgcaatatgaataatattgaatcatctcccttttctgctctctgctctttctgctctttggattggctttctgaggctggcatttagaacctgatgtgggcacgggctatgacccacaagttagatggtgtaactaagtcactgagtttgcctcatagttgcagagctgggtctgagacacagcattgtgacttagctaaagagtgagaacaagaataatatgttcttggatgaagtacaatgcagccatgaaatgaactcttgtatttacactatcaatcccctgggaggagaaaggtgatacaggctggtggattacgttctcaatgatgctgttgtcttccccatgtcacttggggctcagtaggagaacactgtgcagtgcaattttcaaaatgcttgaaaattcttaaagtagtattgtgctaatttcaatgattcaatctgcgagtctttctttaataattttgatgagtatattgttacatgttattggatttattttaaaataatatgtaattcatatgttaggactattatatgacattgttactactagtaatttagaataaaaggcttttttaatatattttttattttgttttgtttttgtaagctggattggaagggtagtgattcacaggaggaattaaaaccatacctccctttttttttttttaagttctctatctttgttggatctttctgtggtttagatatcagagtaattgtggcttcataaaatgagttgggaagagtatcttctacttctattttgtgaaatagtttgtgcagaactggaattagatcttctttgaaggtctgatagaactctgcactaaacccatctggtcctgggctttttttggttgggagaccattaatgactgcttctatttctttaggggatatgggactgtttagatcgttaacttgatcatgctttaactttggtacctagtatctgtccagaaattcgtccattttgtccaggttttccagttttgttgagtatagccttttgtagaaggatctgatggtgttttggatttcttcagggtttgttgttatgtctcccttttcatttctgattttgttaattaggatgctgtccctgtgccctctagtgagtctagctaagggtttatctatcttgttgattttctccaaagaacccagctccctcgtttggttgattcctttgaatagttcttcttgtttccacttggttgattttgcccctgagtttgattatttcctgccgtctactcctcttgggtgaatttgcttccttttgttctagagcttttaggtgtgttgtcaagctgcttgtgtgtactctctctagtttctttttggaggcactcagagctacgagtttccctcttagaaatgctttcattgtgtcccataagtttgggtatgttgtcgcttcattttcattaaactctaaaaagtctttaatctctttctttattcctcccttgaccaagtatcaatgagaagagtgttgttcagtttccacgtgaatgttggctttccattatttatgttgttattgaagatcagctttagtccatggtaatctgataggaagcatgggacgatttcaatacttttgtatctgttgaggcctgttttgtgaccatttatatggtcaattttggagaaggtaccatgggctgctgagaagaaggtatatccttttgttttaggataaaatgttctgtagatatctgttaagtccatttgtttcatctcttctgttagtttcactgtgtccttgtttagtttctgtttccacaatctgtccattgatgaaagtggtgtgttgcagtctcctactattattgtgtgaggtgcaatatgtgctttgaactttactaaagtttctttaatgaatgtggctgcccttgcatttggagcatagatattcagaattcaaagttcctcttggaggattttacctttgatgagtatgaagtgtccctccttgtcttttttgataactttgggttggaagtcgattttatttgatattagaatggctactccagcttgtttcttcagaccatttgcttgaaaaattgttttctagcctttcactcttaggtagtgtctgtctttttccctgagacgggtttcctgtaagcagcagaattttgggtcctgtttgtgtagccagtctgttagtctatgtctttttattggggaattgagtccattgatattaagagatattaaggaaaagtaattgtttcttcctattatttttgtttttagagttgacaatatgtttttgtggctgtctactctttggtttgttgagtgattactttcttgctttttctaggccctttttccgtccttgtattggttttttctgttattatctgttgaagggctggattcatggaaagataatgtgtgaatttggttttgtcgtggaaaacatcggtttctccatctatggtaatttagagtttcgctgggtatagtagcctgggctggcatttgtgttctcttagtgtctgtctaacatctgtccaggttcttctggctttcatagtctctggtgaaaagtctggtgtaattctgataggcctgcctttaaatgttacttgacctttttttttttcccttactgcttttaatattctatctttatttagtgcatttgttgttctgattattatgtgtcgggaggaatttcttttctggtccagtctatttggagttctgtaggcttcttgtatgttcatgggcatcactttctttaggtttgggaagttttcttctataattttgttgaagatatttgctggccttttaagttgaaaatcttcattcctatctactcctattatctgtaggtttggtcttctcattgtgtcctggatttcctggatgttttgagttaggatctttttgcattttgtattttctttgattgttgtaccgatgttctctatggaatcttctgcacctgagattctctcttccatctcttgtattctgttgctgatgcttgcatctatggttccagatttctttcctagggtttctatctctagcgttgtctcactttgggttttctttattgtgtctacttccctttttaggtcttggatgattttattcaattccatcacctgtttggtcatgttttcttgcaatactttaagtgatttttgtgcttcctctttaaggtcttctacctgtttagcagtgttctcctgtatttctttaagtgagttattaaagtccttcttgatgttctctaccatcatcatgagatatgcttttaaatctgggtctagttttttgcatccctcccttattttttagtgcagtgaagatgtgatcaatgataattttgaaatgaatctatataacaagtttataattctataattatttttggaagctttaggaggtcaggcagagaatgaaacaatttaaatggtctcctaggatttggtaaggaagacttctgaaattcattaatcaatgtaaacctaaagggaaaatttaggaaacaccgtgaaatcaatagagtgtaaagcttgctcgctgctgtgtaaatgaaaagcaaagatgacctggctgaaatataatgcatgcatggactaacagactgagacctataagagactgatggttcctggtgcttcttttctaatcctataggagaaggaatggatgtctgttgtgaaattgagtagttagtaaagcttggtttaatattgaagatggtattaaatactccaaaagtaagctattccattacttccattaaaaatgctatttagagtgtttctcacttgacagaattaggtttacattctcaaccctatagtaaaattttataatcctgtccttaaaactgtcatatgcttactcaaacaggtaattgcttccatggggttggccacgatggagtagaaaagttttacactatcagcataatatcaactaaaattatgccacatatgatggataaaaatatgcagctatcctccatgagggaaagaattttaagtccattaagtcatctcttatatctttaactggtaaagacctcagttgaagctttgtgaagaatttttgagggttcctgaaagcctactatgtacaaatagcatgctgagcttagggagtaggggcactgacatgagcaggaactcatttgtgtcatcatgtagctcagtgttgcattgtatagacagacacacaccagatgaaaatgtgaggtgtctcatgctggctatgccctggctatggacatgttggagtaggagaaatgtattttgatgaagtatgtgacttatgaaataaaccttggcagcttccaatatcctagagtgccaaaatggctacgagcctcagaaatgggtcggcagtgattttataggatcctgcatgccacttgggtgtgctagactcactttggaaatcacttgacagtcagcagaggtgttggagaagtgacagaattgaataagtatttaatgcagatagatgtggcatccttgcagattttgtttgtcctgcagacagggaaagttgaagctgtggaaccaggaaggagagccttgtatactgaagaaatggaagagctagtcttcagtgtgtggttagatgctgatggggcaaggtcattgtccatcctgcacctttctctacgcttcttgcccatagggatctccatctctcatctgagatatcaaccttgtgccctacagagatgatgctaagtaacagaaaatctaattacagaaactgaagcacacacacgacacacacacatgcacatatgcacaagctccatatctccttgaatgcatcatactgttggctataaccacactattatcttctcattttaaagatgaaattccactacattaaaaatatacacccattgggtgccttaaccatggttctaacttttatagtcaaatagcctagtattgactgtagagtgaaaagatggcatggaaagttgtagaaatgaagagtttaaaagttttaaatactttatgtcattttataattagctcttaatttttcattctctctgttttcaaataaaattcaggtatatattatagaaaaatatatactccactgtaaggtgctggaatgtattcctctagccaaaagggatctactatacataaatcacaagctatatctctccattgtttgttaaagaataatgtaaacatgggtattttaaaggtaacatattgtagtgacctgcactctaatttattacacaaccaaagtatattctttctaatattagagttaaactttcacgctcttgctcattaatttactgtgtgatcatggacatgttttcttcacttatagtgacatcaaagataatctcaggctcactgaaacacttcaggaagcatttgtcattataatgtcttgtctatgtcatttaccccttactatacaccctctttcagtagaaaagactaccaaaatagtatttatatttccattgtaaaagttagaagtttaaaatacaaaaagtagttctcaaacctctttcatccctgcgatgctcaggtgtgctgaggagccaagaagagcatccttgtgtcagtctcttgcctgagctgtcagcatttccagaatggagtccagaagcccatacttttaacaggctgctcaggggacaattctgtagcatggatgggcactgcctattgtctggctccacacagccccatgaaaactgtaaaaggttttggtgatagctgtgcacttggtgatctttcttgccctttgagcagtattttttttttttttttttttttttttggtggggggaaggtataggaaccgcttggccataactcagtttccccaattaaccacagtattctcctgaatctttaagctcataaaaattgcaattatctcagtgataaacagtgtctttttttcttcttcttctttcagataagcagtaatggactttgggtctggctagatttaatgttgactttactggattggaatgctaatcactgaagtggaaaaatcaacaccaccaccacagaaaaggccttcaaaacattcatttccacacacaattgcattctaaattccaaatgagaaaagccaagggaagcttccactctctctcactacagtttttgtcttgctttatcaccctgtgtctcccagacacagacattgcagctgtcgttggcccctagggcgctcagtccagtgaagaagtaatcatttccttctagacctcaaacacactactggaaattttctagtccccttagccctgtgcatattaaaatttagcaattaattatctctagttctaatccagtaagcctgtgcaattaacatctgggattcagttcatctttttgctgactttctcatttcaggattgggagactgtggatctccctagaagacatgattagcacaggttatttcccacattcagatcttgtttcttgtttaacccatagtgtatttgggcaatattttataatgctttccttaacttttttggctacctacaggacatattgttagtactaaataactataaagttacgactaattgaatttccttcctttttaaacttcagtatgtcaatagcatgtgaggatgagctattaagaaagatttttggattaacagagaaatagcctttgcctcctggtggaattttcattgctctgccctacctgctcagccaacctgctacatcttcttgcctgatacttgaaaaatcctctatgactgggtacactgtttcctccttagagtataggataactcagatataactgtagatactaacaacagctaatattgggctttaatatgcaagatgttataattaatgtgaggactcgtctccagagttgttcatgatggcttctacatagtgattgcctctgtaattggtattgccagcagatcgaggaggaaggcagccacataatcggtagagaaataggagttacaaagaattggatatgggctttacaacattggctggagcctgaggctgtgagatcaggggctgcaatgcttctgtggagattctcgccctcagtccattagatgaggctttgtctccaaccctagaagccgtcttggctgctggaatcaccagacaacactcatgacattttgtttttctttctactttccttacattgcactaacaagtagccttccttttccaaaccagtctctaatatcaggagtttgactttgctgacaactgttttgtctttctattagttccttacaatagtaaactaaacaggtgtgaatatagccagtctgatatagactaagtgcttgcagtataaggctgaaaatataacttatcaactaattaaaattatttgaaaacattgccccaccacccaaaaaaagaagcaaaaatccataaattgtattttttagttatgccaggtggtgacatatggatctatttcctgacaatgccttctgggatttttctctgagtgcaaatatgggactgttttgtgtggtcataaaactcttacatatatttgcatgttttgtcttccactttgattacatttaggtctactttgatttttcacactattaactactggaaaccccatctcataatttttttcagatctaagtctgggtgtataagaatttgttctaatttttaatacttttgttattatacacagtccttcttttagtctctgataattacattgacataaatacttagacatctatgaatcagtgttttgatatgcattcacatttatccctagagggaggtgtgtatgtatgtctctatcttatagcctctgttggcttttactgaaaaacaattgacagcttttctaataaaaatatcatttcattgtcataaattatagtgaattgaatatagtgaagtttagtgctgttgatatttcagttgtttatatttctctttttatgatctattcatgatgttatcctagttttctgatgaagaattacatttttctaatactttatagttcttcaagacattcatttgtatcctgcaatgtaacttattattctttttgatagccctgggacttatggatacaatggaagtgctactgaaatagactgtctgtcctttatattttattttgataatagttctttctaaatggcccagtggccctgagcttacacatgctagccttagaactccagtcttcctgccttagcttcccaagaagctattcttcatatttttcaaacaaatgttctcaatttttcaggttttatttatatgatttatgtttcaggtttttattatcaagagaaatatctatctatctatctatctatctatccttctttctttaatgttttagtggctttaactttaaactatgtccttgccaagttaattcaaatttccttttaattatgatgtgactaattttcttctcattttaataattattataagaaaagaatataccatattttccattaaaattagccaatgtttttactactttttttttttttttttaatgtttttccttctcgaggatctggcctgtcagtctttgcgggaatggtgtcttttgtaaagaaaagctcttgacttaatatggtattaggccctgataaaacccctttaaacatgaggatatttgaatactccccaagttcagtgcctagcagtgagtgctctgtccaatgttgcttgtttccatggtgactggctcactggaagcagcagctctctgtttctgccaatcacagcaacagagaagattgcactacataggggtgtgaaatattttacaatgtaaaatctagactctgccgaatgcctatctgtttgctatttgttgtaaagttgaaaactatcaagtcaaagcattgtaatttggggaccattcagagattctgatctttttctgtgtgttctcttccacccatctgcttgagtgtcctggaatgaactctcatccagctattccagtcttttctctttttaagaaaatttagttcaagagagttctcacctagtctaattaaagaacaatatatgcatatataattatgtttattcaattgccattataaaaagcagtggaagctttatcaattaagcagattggtggaagagaagagagcattttcagacatgatgttgtagctgacttatgtctgtttattcctaaaactggattgagtcctttttcccttgagtttctggagctcgaatcagggccccatgcctgctaggtaagtattcttgccactgagctacacctggcccttggtcagtgttttcagaacaggaaaattcctattgcttccccatgagatcgtgaaagtcaaatgatgtatgttagactctagttcaggcttgtgatggactgtcatgccaggggtcagcgcctggagtctttcacagactaggaaaacagcacactgctaaggtacatcccagcctgctacttcactccattgtctttctagattgagattcaagttctagtctagccttgcctccaaacataatgtcttcatcagaataacggtctcttatactacaaatttcccctcctttttctttctttgttccttcttttcttcacagtgctggatggaatccatacatcctgtatgtatcagatgagtactataccaatgagctgcaacccagccctctgggccaggacttgaaaaacagagatttgagagtcgttcttctttaagggtatgctccagttagatgggacacactctgtccagtggatagacctatacacagaagtctatggacagagtgaattggactctggtttttttttttactgtaacttctttttaaaaattaataacttatttacatcccaactattgcccccctccaagagttcttcaccccattcctcttcccctttgcctctgagagggtgctccctctcctcctaccccatatctcccttctctacagaattaggtttaccctctctcactgaggccagacaaggcagtcctctgatacatatgtgtgggccagggcagggggttgggggagctgggaccaccctgtgtatgttctttggtggcttagtccctgggaactcccaggggtccaggttagttgatgctgttggtcttcctatggagttgctatcccctatctctcccaagggggttcagaaccttagtccaatggtttgctgtttagtttctacatctgtctcagtcagctgttggtagagactctcagaggacagccatgctagtctcctgtctgcaagcacaacacagcatcagtaatagcttcagtgtttggtgcctgctcatgagatggatcccaagttgggctggccactggtcagccattcattcagtctttcctccattttcatacctgcatttctttcagacaggaacaattctgggttaaaagttttgaagatgagctggtattccccatccctccactgggagccctgtctctctactggagatggtcccttcaggttccatttccccattgctaggcatttctaatggcaggaaattgacatggaatagagagctgggggtaagtttgggaagagttagaggcagaagtgggggtaattgtgatcaaaatacattgtgtacataaataaacttatcagttaaaaatattatattttaaaaatataatgtttaaatttgcttgattataaaatataacaagtaacttacatgaaatgctggtttcagttcagaatatacattttcaactttggggggtggctatctttaaatgtcaaaatgcaaaatgttactatcggttaacagccattttttgtagatttacagtgctaatgagctttacacttctgtgccccttttatctcacaaaactgaaaatctgtaccactgagtaacagctacccaccatctgactccctctgcctcaggcaactcctgccccactggtctctctgtgtataaagccactcctaccctacatataagggagagtgtatgggatttctttttgtagattacttatcataatgtcctcaaggtttgtgtttagcacgtgtaaagatgactatgcctcttcaagctgactgactcttcatcttatgttcatactcttatcatttatccatggatggtcacttgattgctctagcctttttgtctgatgactgatgttgtaaacatggtatagaaattaacttatgcatttttgtggtggttcatgtaacccattcttaatcttgtgtcattgagtttctacaggacaaagggctctgatgtgtgcatagttgctggaacacagtggctaatgtgtagtatcacaaaaccttgtattgcaaagactgcgtgagctaattagctgagtgccatgcacaaatatttagcagctcttgctttccatcctgttttagttgagctattaaacctaatggaagaacataaggtttgtagctgtaacatggagatagtataaaatacagcctaccacccactcacttcttccttcagtggtctatagaatccagggtagtgatgtatgttggatatagacatgaaaaagacaggcaagacttcttgcctcattgggatcctgatagagaatagaaataataataagcaaaaccagatcacttcagagtgtaactaccatgaaaacatagcaattgggcatgagacaaagctgtgctagggcaaaaggatcatcagtacaggcctctttgatcagctaacttatttctgaataattagtgagcagaagccctataggggcctctctgtttgatttttctactggtgtttcatctaaacaatcagcccatatatttgccatcactggtttgggatcacaggttcacaaatggcttctattggcccaataaagtaaaaagaaggctctcaagagcaaaattaggggagacttttcttttttccctgctgtctaactgtatccaaggctctcatggccttgattgctgctggctcttttcatgttcttgtgtcaggactctccccaagagcctgttatttttgtatacttctgatggattcctacaattgctattctgcccttattcaagtcaaacttgttgggaaaacaaaagcagtctttctcagattctcttttaagccaggacagaggatagaagcagtttcttcaattagatgtgaccatgtgatgtttaaaaggtaaagggggatggaaacaccttccacacctctctctgctcttttggcaacaagggtgtgggaaggttgcctccacaaagatcttcaggtgtctatactccagtttcttgaattgtaaaggccagctgaagtgtgttgtagtgagtggtggcagctcttgcacttattcaagtcaaacttgcttcctgaactccaaactagtgattttagttcactgtggggagagagacacttgtagaggttcctgatttcttttaatggccagaagatggaaacaatagctccttctgacttcctagtggttaggaatcggtggatctggaagttgtcccaggaagcttgctggaagcctgtttacttattcttgtcagtaatttctaaaacatgaacccctctatattaaatgcagccccctgctttaaatctctagtgtgtgtcctggttactgtatttgtactgtatgaggcactaaccccacacttgaagagtgagtgtattatgctacttatgtcattacatagaatggtcatttctcttactggtccagctaattgcatttgggattttctttttcttgtaactaaaatcattccttactgaaaattccctgcttcttgcaatcattgttttgacatctccttctttctgataaaacaagtataaactaggcagccgatactgaaaacttagtattttctctcttagtatagaccttgacacacaagcatgagcccaaacttagtcccccaaaacccaggcattgtactacatgtttataatcctagtgctaaagagacagagactggcatatccctgtagggcagtgagacaatctgtctctaaattcaaggtatatagcctagattaaccagctattacacataagcatgcctgaatgtatacatctacaacaaatctgcaaatatgtacccctcccccaacacaattctcatgacacacagggctaccaaattttcaacagccaggatattggaccattggtggtctgaattatatgactcattcaatagatatcataaaagtctataaagctgttttaacatttttggtaaatttttttctagactcagctatcaaaggcaattacctgaaaatataaatttggagaattaataccttatttcagaaaaattgaaggaaactacaggaagtatatcctctgactacttctgacaattactgtgggtcttcagcaaacctgaaggcagggaggggtgggagggggctgtgtggttcatgaagtagctcttcacccacacaaggtcagatttatgcagagaagcagcagcaggtgaggctgagaaggaggtgtctagggcccttgaattccattttcacctttccttcacactaagcctcagtagcgcaggacacttagggacagagaagccactttctgcagcatttaagaaaaccattaaccacttttactgcaaatctctgagcatgtgttcaggtgctttctcacttgtgttttgctaggcctgctgggatatgaagcctttggagtagcatttttaattctcccttttattttctacccctccaattatctctatttattccctctttaagaataagcaggaggtgggttatttttttgattgtttgtcttgtttgttttattttttgaactcacttatagagtcaaattgggttaatactttactttcggaatcatgtttttgaaggttaatactgctaatacatatgagatagcaggcataatgcaaatgcaaatcatgatgtcaaattcctcttgctaatgcagttaactgatgagctaatatttcttcccggtcccttacgctgaacttggaaaatccttcccatttaaattgtaaactggagggaaagttgctttggctgagtgagcacaaccaggttaccattttgccctttctctcttctcccattttccttgtagctggaaagtaagctttcaaggaacaacatgaccactaactctggtgatcacgagagaaaaagagaactactaggtaataaacagaaatcaaaggttccacaattgacatgaggacaaacaaagccagcccaatgtgaaagcagaagtagacatggcaggtgagagacccaagaaagtgggaagtcattcatatagagagcccttttttttttccattttttattaggtatttagctcatttacatttccaatgctataccaaaagtcccccatatccacccacccccactcccctgcccacccactccccctttttggccctggtgttcccctgtactggggcatataaagtttgcaagtccaatgggcctctctttccagtgatggccgactaggccatcttttgatatatatgcagctagagtcaagagctccggggtactggttagttcataatgttgttccacctatagggttgcagatccctttagctccttggctactttctctagctcctccattgggagccctatgatccatccattagctgactgtgagcatccacttctgtgtttgctaggccccagcatagtctcacaagagacagctacatctgggtcctttcaataaaatcttgctagtgtatccaatggtgtcagcgtttggatgctgattatggggtggatccctggatatggcagtctctacatggtccatcctttcatctcagctccaaactttgtctctgtaactccttccatgagagcccttgtgacccgcaccacagactgaagattgcagctaacaggaggatctaggggcttcctgtccagccatgaaaccaaacaataggaattcccagcaaaatacaacagaagcttctgcactggataggcagaacataaaacaatgcacagaaacaccaaccagccagtgacctgggagaaattttcattacttatcttttggcttccccccccccccccccccggaattaacttttgagctccctgaatcccatgttctcttttcttttggtgctgctatagaatccatagtaactgcttccttctaactaagccctcagatagtggctgctgaaaatatagatcatcagctgtttgctcagtcaggtctcagcatctccaccagagggaaaggttttgttatgggaaaggccctataagagacctggtgctttggctcctagcgaatatcagtgatctgacgcctatgggcaagcctcaagatgcatgaagctctagtttactatttctcaacctgtaagtcctgacctcttgagggggatcaaatgacctttcacagggatcaccttcgaccatcagaaaacaaagatcttcacattgcaatacataacaacagcaaaattataggtatgaagtaacaatgaaatcattttatggttgggggccatcacaatatggggaaaatatgaaagggtcacagcattagggaagttgagaaccactgctccagtaagattaaactgaccagtctgtcaaggtaattaggctagggtatatatggagacaaatacttgaagacattttgttttgttttaaggcatggtttcactttgtgacctagaattactaattctcctatctttatttgtgattacaaggacatgccactatgcatggcttagaaccttggagacaaaaacaccacagggtttgtctactccactgtcctttaaggcagtcctccaagctgtatgcactgtgtctttaaaattaaaccattgaaatggatgtctagtcacacagctctggactcaacaaagcaagctgaaattgctaacactatgctttctggtacttatgaaaggttatattgaaaaactatcagctcgtatgcagtctacttatttttctattgataggttcttttgataagagtctgactattgatctgcatcttttatctgtgagacaagctatctgtaacaagagagttggctgtgaagatttgtctctgtataaattgtggatatgcaaacaggttgaagcatcatttacacacatgcacagacacacacacacacacatgcactcacacacacatacactattgtacatgcatacacatacacacatcttttgtattaaatgatatatctgatcttttaaatgttaaaatctgtttaatataaataagtctcttcctaggaaaatattgcccagatttccaggcatatgtaaagataggttttaaaagggtctattcaactatcgtaaagccaatgcaaattatcactaatttttctcagttatgtatgtacaataggatgtcctacaatagaaagtcattttgctactttacacaataggaatttttatgaggaagtttcacattttgtaacaatgtcaaattataatatattttggtttaatttagccacaaaatcaaagtgtgtgcgtggctgtggatgaatttgccctttaaggctctctgatgcccaaatagccacacttcccttgctatcacttgcatctttgtggcacacccctgcatgtgaacgatggggcacttgttccttaggcacccaccccctgcacctagagatgctggattagtcttctaagcaacacagcagttttcactggacaactgagattgagtttcttttgatgtaaatttctctgaaaactgtatcctctattaccaatttcacagtgccctttccttttattcttgaaatataatttcaaaagcttttagagtaaaagccaaagactttgagatgggctttcaaccatgaacacctgcatttaaggtctcctaagtctggggactggaaatgtgggtgtagaagctccttcacttcctatttctgtcttgctaaccttaactacccctggcagaggagaaggcagacagcccttggtgaagaagaactgcttctatacacaaggccggctgggtagtaaagtaggacattgcatctcacattcttcagtgtctcactatttcagctcaaaaaaagcatataagctggctgaggtccccaagtaaagtcttacaaagcagaggagacacaaaagtctcaatctaaagttatgagcatgaaattaaaaacaatactataatgttaatttaaataaactccagggggggacccagaagctcagggccggccagcctagccaaaatggcaaggtttggttccaaaaggaggcattgtctcagagatacaggaggaggggggtggaggacacaatggtgcccaatggcctctctttgcacatggagtgccatgaaccaccacacacccatgaacacacatgagagcatcactccactctcccatccacacatgggaggaagtttaaggtggggctgtctgctgctctcggtttcagtaatagcctagaacttggctggtctgtactctgtctgattcaatgaagctcctttgtttcttttcaccctacagcctcataggaagcagagctggtaatcttaattaagaagtgtgatactttgctgcacaagtgtgaagtgcagagagcatccacccagccagatgctgaagcacaaattaggcctaattgagctcttttatcattagagttgtattttattttaaaatgtatagagacagtaaggtctccaagagagaatactcagaaggcccatttgaccctgcagttagttgactagcactggggacatttgaaatattgtgctctctctctctctctctctctctctctgtctctctctctctctcaaaggaacattggcgtggctggcaactaagtttaactggcaactaagtttaatggaacctcaagcatgccaatggctcagcttggagggagaatttgcttgttctgtttcattatgggtttaagtaaatgtaagttttctctggcatgaagtgaggtctggaaaagtccttgcttgggttctctttctgctgtcaccttctcttcatgctgactggtttgttctgtcttgttttagtaatttgtcagccctcgtaatgatgtaatgaatgttcttttagattcacggtgaagtaatttgagttctcaaagataaagtttgctcagcacctgtctctcttctctccctccctcctcctcctctctctctgactctctgcagttgatcattactatctgctagcacatgagcatcttacacataaaggatgtcaccatcaagtctagcctatgtttcatgcctaggccctgctttaaataaacactaaaggtggcgtttaagtcacgctctctgtggcactttcatattgtatactcaatttgcccttttgctctttccatataaacttgtcatgcttgttttgaatggttcaaatagtttcaaagataattgctacaaaggacatgggccctgcttattgagcacagcataaatgtctaacatgaggcttaccaagtactcaagtgatcaagtactgttgactggtgactgcttggcagaaaggagactttcttcctgtatgtggccattccctggtacgaatgaatgagaagtcatgttggtgctgccttgtaggacttgcctttctctagatctcatggctgattttgacctgcggtagtgtttgaaaagcatttacctctttcttccaacaaagccatggcatcatttagagagcatggaacttgactttgaagcagtgatgtgagaacatatctgacagaagtgtgcctcccccctctctctccaaggtatatgagagaggggaaccagatacatccagatgttaagaaaactaattgtaactttatgtctaaggtaagtgtaatcttggagtgggctttatttagttattggtgtaaggaaaatatgtctaccaacttcacattctggaaaatctgggaggccagaatttcccagcaaaaagagagggacagcagttcaaagagaagtcagggtacattagcttttcttaagaaggaaaaatgggaacacataaatcatgacttcctatggcacaaaaggataatattaattggtccatcctcccagaaagaaaaacatgaggagaaattgacttttgcaaatttctccatgggcaggggatcttcttacatgcaggccaggcatgagtgggtaaatgtgtcctcagctgtacttgtcctttttatcggaagtaggcagggttggtgttttttaaccggtaagtgtgctactctccctctcctcccttcctgtttttaatcatcccacatgttctctctatctcattctcccatcacagatgctgtgatgccgtctgttagtgacagggtctttgtgaatctaagaatggaaaagttagagttctaaagaggaggaatactaacatgggtaaccttttctattgagagatgttttattacaggaacaggtaaaggtgggtttttttttaagttcttattcatttaacattaattttacaaaataacttaatgaacatgtcaagaacgttggctctgaagattcatgccttgtgtctttctagggagattcacatcacggctgtatattgctgaggctccctaagaacctcaataagaattggattagtatctctggactggctcgttcattgtgctgcattcccctctcttccctgactcacttgacacctatgtttctttaaaacccctcataaccatttgtactcgtgtattacaggctctgctttgcctgtgatgtggttatctaaataatctttgctgctgtcttctgagaggcccttagcatcatcttccactaaactaagtgactagggaatgcagtgggtgctagatacatgctgtttggcttgatctaagttgtttggctaatgttggtaacctaccatgtatcaggcattgtgctgctgacaataaacctatgctttagttcttgctcaaccatttctgggactcacacagtaaaagggcacatattttaacagattaaggctctgcttattttctgtctcatatatctttgacatccgaaaaaagtgtcttagttactatactattgctgtgaagagacaccataaccaagggcgttcatataaaagaaagcatttaattggggctggcttacagttttagagaatgagtctaggaccttcatgtcaaaaaggagacaggcacagtgttggggacaggtatagttgagagattgacatctccatgtgcagacagcaggcagcaagtagagacagacagacagacagacagaggcagagacagagatagagattatgcttgctatggacttttgaaatttcaagacacattccaagagacacaattcctctgacaaagccacacatcctaatccttttgtaacatttccactaatcagagaacaagcaatcgaacataaaagtataggcgggcacattctcaaactaccacacaaagtaaaacctaatctggggcttgagccaagttctatttaactgcagtgaggttgaaagctgtcctagtaagaggttgcagctggcataaactttcaggtactagaagttatacataatataactggcaggaaactctgtgtgctgtgtgtagttggtgcacatgggagagcacatgttgctgaggttggaaggagtttagggagccaaggtaatggctggctttgcaatgggatggggtttggcatgtatttatttgtttcacaggcactgaatgactctatgtgttgtgttttgatcaaatagaggctacagtgactatcaagactgtttctttaccctaaaaaatactgactattggttgaaaaaatgaaaataaaatgaaacactgttagggcattattatgggttgtgttttaagcgtcaggaaggacaaaaatggtgtgtgatagaatttagcaggagagttaaggggagcacatgaaattataaaagtgataaccacagagggttgggatggtgacacccactaaacttagagaactgagagcagatagctctagatcaaaggaagtagatgtgagagtaggtagaaagcttaggctgtggctcaagctagatatagagaggtgccgtagtccatcatgcagggctttgcaggccagataacggacagatctattctcagtgcaaccaaaaggcattatagcaaagagtaggaatgagctgcattgcactgtataagagccctctggtgagtgtgaggagaggatgaagggggaggaaggagactaaaggctcacttagaagacctcacttccaggtaagagttcacttccaggtaagagtgaccgtgccaaaggattaaaatagcagaccctgttttcaaagtataaccactagaaatttgatttatcatatgttccgttctatagaatggggccttacctttaagtggctgtctataagctatcttagttgtctaaagggcaaatgaatacacacacacacacacacacacacacacacacactacttagtcgctactttacaaccaagacttattttagtgatcagaaaaagaaatggcagatctaggaagatgggtgtattgacaaagtatttgctttgtggacatataaagacctaagtctaaatcccaggaatacatgggaaaaccaggcatagcctcgtgtgcctgtaattctagtgttatggggcagcagatgaattctgagaagtccacagtcagccagattcgatgaaggaaggagcttcaggttcaaagatagactctgtctcaggagagtacattgcagaacaatagagacagacacatctttttgttatcttaactccagtgaacatatgcaggcaggcacacttgcatttgtacatgtgtacagcacacacacacacacacacacacacacacacaagaatcgtgaataacaatcaagtaaactgttgtcttcccagccccttttgctctaactatcatactgtaatctcagggatttgatgatatttttggatgcaaaccagagaatgaaatccaaagctgtaacaataaactaccaatggccagccggctatgcagtaagactcctacttaagagcctggaagcagaaacaactcaggatcttttttttttttttaatattttttaaatactttttgttttttgaactgggagatagcaatcagggtatagtgctaggtgctacgtgcttgtaattccagtgttggagacatagatagaaggaaatgcctggggtcactggccagaggactagcaaaatggcaactctcaggtcttgctgagagagcctgtctcaaaaataaagggaggtggcatctaagtaatgatagctaagggtttattctgtgctctacacacattcatgcacactcatccatatatgagtgtacacacacagctacacacgcatacatatgtacatacacacacatacacagttaaaaaactgtttcatgaataactcaattctacacttgtcccaatctcaaagcaagtaagtttgtctgcatatgcccacagtgaagattttcatggttcgaaacaactacaaagaattttgtaactgcactattcggctgaagacaaaggctttcttgtgcagttctcttggagcctggcagaacaagctgtctagctgatctgtgagtcaaggttaggaccagacaaagaaaagggattcttgtttgtgattgtggaagcttggctgttactcatgtgactcatttaagcagaagtcttttataaacataaccactgctttgtgaagcacctggaaaatgttcatttggaagaaaagtttttaactgctgtgtctcaggcagtttggttactctttggttagattgggcagggtcactgctttctgggagcattttagtagttgttgagaggagccaggtatacagtaggtatattgtagttgtttagaggagacaggtatacagtaggtatattgtagttgttgagaggagacaggtatacaataggcatactgtagttgttgagaggagacaggtatacagcttctgttccttgtgcttccgtgaaaatccccattttgtccttactagtctcctggcagctatgtgagctccaatttcaatacagaaatctaaacattgaaacttaacatccgcatatgagaaaaaacatgcagtgatagtagattttttatttaattaatttatttactttttgttcttttttattagatattttcgtcatttacatttcaaatgctatcctgaaagtcccctattccctcaccctgccctgctccccaatccacccactcccacttcctgaccccggcattcccctgtactggagcatatgatctttgcaataccaagggtctctcctctcattgatggccaactaggccatcctctgctacatatgcaactagagacacagctctgtggggggtactgattagttcatattgttgttccacctttagagttgcagacccctttagctccttgggtattttctctagctccttcattaggggccctgtgttccacccaatagaagactgtgagacattggcatggactcacaagagagagctatgtcagggtcctgtcagcaaaatcttgctggcatatgcaatagtgtctgggtttggtggttgtatatgggatggacccccaggtggggcagtctctggatggtctttccttactttttgttttgagagacaagatttctctgtgtagctccagctgtcctgaaacttactctgtagatcacgctggcctcaacctcacagaaatccacctgcctctgtctcccagattaaatccccatgctgggattaaagttctgtgccaccaccacctggcatcagtgatagtgcggttaagttctgctccatgggataaaacttgtgcctggtactgtcaattgggcagagccctttgactcaccatgtcataggtattaatagagaacctactgctattattctgctaaattgacatagtattaaagtggcctgcatgttcctatctttatcttacatctctcaagtctcactagagaagtttattttagttttgcagtcgatggtaattagcagagatccaaaactgtcagtgtgcagaaaataagtgatcatatctaaatgggacatttattttacacctgcttctcacaaagactcagggatcactgaagaaaggagcctagaaagattgtaagattcagaagtagtagacatcctcagtgaaacattatttgctatgcatgatagggctactgcacacatgagttcatagcaactgttactaaatgcataatacctgtacaagatcaaaccagaaaaaaagtcctagcttggaaagaggggggactcatgaagtcccaccattgtctgagaaggtgatggctgctgggagaggagtacattttcttctggcatttggcccctgaaggggtactcattttccatgagtaacatgggtgtgggtattagctgtatctatacccatgcaatctgcatacaggcaccactgattggatgcagtgaattaagacacacacacacacagacacacacacacacacacacacacagagagagagagacagagagagagagacagagagagagagagagagacagacagacagacagacagacagacagacagacagaaaaagcacatgaaatgaaggtgggagagaaaattggtacagatgcttgaagaggattgagaggatggatttcatcaaagcacattatgtgtgtatatgagactctgagacaattggggaacatgtgtacaactttgtcagatgaagcaaatgagagagctcgaaggaggatttgcatctgctgctgtaatcagaaatggatcctaggaggaacactggtcttatgtaagtgccaggttcccagtgctaagaagatccctagagaaatttaagcttgcttaatggttagctctcatattctgttgttcagaatcctggttctaggaccttgtgttgtatcaacttcctggtgatacaggatttatcccatttataaatgaggattgttgtgtgtgcattgggtgagtatgagaatggtgtagggtgtgtacatagcacttttcatgatgcaaaattagccgtttttaattgttgtaccccatcttgatctgatggaatcacaacctcatgtgggcttacccttgtcctggagcaatgtgtgttgggactattgttcttttagggcatcccattttattggtgaatcatatgagatgttaaaaagtcatggccagttcacagaaaagttatcaaaaagtaaagtaggaagaaaattctaagtaggaagacatctgtgaccaaggattatgaggcagacatgtaatatctttaagcaatagcacatggtttccatttttctgaagtagcaagtgagaggtgaaggagcagcagcagtggagaaagtcggggtgaccgggtcaagagaagggtgtcatcactccactgcagcccaggactatccatgttcattgcaacaggtacaagactaggaaagtccacagggaagaagctggcctggagaatggagtgacaaaggagccagataaacactgttggatgatttgtcttactgttactctgggctcccaaggagttccagactgattttttttttcagagtcaccatgtttaaggacatttcccttttacactggtacatctatgctttctatcctctgtctggaagattagtgtacttctcagaccatagttatctctagagaataaagcagtctttgctgggaatggtgtctagacgaagatttagcgacactggcttagtcaatattaagcactaattttgcatttcttctctgccctaaagtcatatccacatatgcccttttgttctttgccttttctgagcttcccatggtttctggaaccttaaaaacaacaatagcaaaacatcaacaaaataaaaacagaaacaagcaaacaagcaaacaagcaaacaaagacccaagctttggcatgtttgtgttctgcattcacccagtactttggctcttttcattttgagatggttaaatagagggacatctacaaaaaaggaagctcaacactgggatgtcccaaaagaataaaatgtatagaaataaattaaatatggaggtgcttttgtgtgtataggatgggtggccctttgaccctttcctcctgaagtagaggcaacgttcagatgtggtgaatcagaagagtaaagatctgggctgagaaacaacagaggtcgggagtgaatattgatatggatgattgatgctagagaaaaactcaaggaatttgtgctgaaattgatctttgatgttcagataaggtgattataccagattagccaggattctcaacatactgaggaactggcttctccttgatgcttcattgtgcactgaagtctaataatctagaaaaaaaaatctgtctggtaatagctggaaatggtctagtctccatcttaggctttcctactatacactgggcctccttgtaagcaaattgcaacacccccccccccgcaaaggctcatttgtgatttacaattccttaatcagaacatgaagaaagagtatacacccaaaataatttctgaagttctgatttactgcttgcgtcatacagtgatagagagagccacaattttagtttcctactttcctttcaaattcacaaggaaggaaaatgtaggaagcaatggaaaacaataggaaagatattcagaacaaataatggcttggggaaaactaaaaaggtatgagaaatacttcaagactgtcccaggggtgccacctgtttctgtcatatggaatgcatggcactatttcaaatccttcaggatctgtagagcttttgcctctaagctaataaacttacaagatacatcatccggccagtccgctatcagcacatcccgcctcagactcttggcgataaggctttatctcccccctccccttccttctttataattcccagctaagctaatgaagcccttttggtgttgtgtgcattcaaatggctcatctgcatgaaaacctctgccccttaattatggaaaacagatattaaaaaataattccatgtcgctagttgggatcaaggtgctagggccaaatcctgacatttaagctcttttcgagcctcccttttgagctcagactcatctgctaaactaatgccactttgatgctttctggcgcttttgagctgctgtcctctcttcccccttacctacaagtggtggtgcatgctaggtggcactgagccaccacaccattcagtaggatatataagccttcaagttgggaatggaattgtaaggaaattggatatggcttggccatccactctcctttcctaagtgtctcatttcgccttgacaggtgtctgacatgagatactgtcagaaccagaattgaaccttggcacgccaccatccattaggatgtctctggataggaaacagtgaggctgatatgactgtttgaaggctggatacttggagatgtaattttatttattttctagatgtatagcctgtataggtaccctcacccccgccaggtgctacaaaaataggtaatgcttaggctatttagaactgtgagtgtggtgagcagttcttataggtgaagcccagccatcatctaaaattatattcagtggaaggtaagtcttctattgttttgataccttcacatttgatggagttttaatttatcaaaaatgtccagactactgatagagatgaaactccttagagatcagtgtccaaatacacaagatgtatcagaatgagtgcttgagaatgtgagatagttacactgctctaggagatgatagattccttttgaattgcatgctggataagttgtttgtggactttgtagattttgctgtttacccctaactttcagggttattttcattagggtgtcattgtttaggtggtggctgagaacccacatgctagcttagttggaaaaacaaacaaaagtccactcttacatatgtgtacactctttataaatggaaatagctcattttttacattagtttaagccagatacactttttctccactgaacatgacacattaatattttcaataggctgtatagaacactagctgcctacctggatcactatgccctaatccttaagtgctgcacatataaaatgaagagttcaaattggagacagagttgagagaacacaacttcaaatagacacataaccatcaactctactagagtcccaagtaatcttgaggagactcagataggggccaccactgtttctgaagatggaggaatggaggtgaatgttgccagaagcttctaggagctgggaaaggagcctgaagaaaagattttagctgtcccacagcttaacttctgccttggggaactccagtgagatttctaatcccagagcagcaaggtaatagcagccctaagaaccttatgggataccttcatgatcaactgggcttcctgttttctcaggcaggctcagggtgtttgtaggaaaagaagtttcccctctgcctgtaactcttctctctgtaattgagatatctttggcattggactagttcttgcatcaggcatgttcacttagaactgatacacaatctattttctccttcttgttcatggggattacatgaggaaactgactataatcagctatgaataccttccagactgaagttttgggggagcttgtagggttcttttattcatagtgaatgtcaatagcattcatattattttactacaccagccagctgacacttccctccccatcttgttagagcaactgtacatggataggggtttctttcacttctgtttcctttgcttagtgatccgtcctgaaagcttcatgttgatcctgtttttattaaaattatcctttatctaacaatatattagacataaagaagagcacccctagattaaatcattctagaagtgctttgttgttttatactgttcttacagccaaatcttcatgtagaaactatgtatgatgaactcagtggctttaatctcacttttacatccataaggtattatacaagcctgttctatatgggcagcctattttggaacatgccattgtatttgattaagaatctcatcaacaacttcctagtacatggccccacctccatgcctatttgtatgtaaagccacgccttcattgtactgaagaggttgttagtattatgaaaagcaaaggggaagacaagaagttgggagggagacatgatggggggagcaatagaagcaactagaagaaagtaatggtggataatacacagtgcatcaaaatactatgcataaaaatgaaaatttcaacagataagtagaaacctgtatttaaaaaaactgtatttttttttcttttggctatgccatataagacaatggacactctgcaatcaaattcaagtgtcaccaagcaggtagaactgtaacagggtaaactggttgcatttaatgaatcaacaatgctgtgcacacttgtatcttgcatttgtattcattcatttaacaggtaggtgtctcttgagtccctctatttctttgcaggtatagcttctgagaaaggttggtagttcttgggagatggtgttgtcctggagattgtggttatactgttacttaaaataccttttccattctcttgtatgtcaccagtgatttgttgtattaggtaccaaagggaaaataactcagttgcttggcagccaggaggtgatgtgtcaaggttatgatgtgccaccatcatatggatggtgactaggtacaccagcccttcttccacacagggaagcccaaaagaatagtgtgtcatttcacatcccctgcagtacccctgactccatcctttctccaccactgataacccaggaccaacaagtgacactcattcactcatggtatgagtaccattcaataactctctaactctagaatcattcaggagtacttaagtgacattgaggtgtcccagaaaaggacctccctgctaattttcctgctattctgcctgactatttcgttttctccctttctcttccctccaataatctggcattaaacctctgacctcaaacaaactaacaaccactgcactctgatccacatcaccaggcaaaaactattacttttcactaaatgaaagttctttctgagctggcagtgatactcagatgggtacctgagtcaactagcatgtacatagcactagtctagtcttgacatccattattgtatacaggcatgcacacacacacacacacacacacacacacacacacacacacacagagagagagagagacagagacagagacagagagacagagacagagacagagacagagagacagagacagaaacacagagagagagagagactaagacagtgtctaactcctggaaacctatcctcaatgtatctttctacctagagttaagaggggacctctccttgcctagatgaacccaatattttaaataggcctcatgaagttcatgtgttggctatttaacagtgttgaaaactgggatgattagagagtgattacatcttttaggcctttattaatagattaaggctcatctctggagagtagcctcattataagcatgtattcagtccctctaagtgatgtctatgactgattggaaggcaaaagaaggtcctggatcttgcctgaagaatgatcagatactaagtttcagttcaccataactacccattctgcaggtgagtcatgggagtgtgatggcccatgctttctatggctacgcattcagcagtgctcctatgaaagtagactttctagtcatgctgtagccatcttagattttctaagtatgttttatgatgctcctcaaacagagaaatcacctagcaatacaaatcttggactgtatgccctatttaagcaacttaacattctattttaatagcagaaattggataaagacaaatttatgaatcttagaaaaatgagcatgtacatgtcaaaattctcacccacctgaccatttctgattcttacattctataagcagcagtgtattttggtgtaattgtttactaagatacctttccgaagtttattgctatagagtagtgcttctccaagagaagagctgtttacctctgcatcagtgagctttagctgaaaggccaatgctaatgcttcccagactgtcagccgagattccctgctaattagtcactatggataaggagacagtattttgaaattgtattcagtgtgttctaccttgtgcatgtctctttgtccctcaaaggtctgatagatgatcttaccacaggtctctaggccactggcttctgaaaagcaccaatgctttctgctctggtctgtaaaacccaaaatcattgttgcttgattggtagcaggtctgccctgagccaggcattggagcagcctatcaaagacaagttttacagtgtctcagccctcaactatccaagtccccagcatggcattctgtgggtagatagtaaagaaagacttgccatcttgcttcattggtcattctgcgaagcttctggcctttcaattacccatgagtgtcagaagaagaaagagaaccctggagaggtgaactatcttgtgctacttcaaaggtggttactattccttcccatcatgtaaagaaaattcttctagcttacttgataatcctgtttttccttgaaggaaagtaacggtctatctaccaaatgggccactgaactagcactatcattactgatttctaaactcattagggcttagttagtattcccaagctgctggagagtcttaaaagtaatttctccggggagagttatgaaaaggaaataacaagtttgtagaaaacaagttgcaggtacttctgatctctaggctaagaagccatgagtgttctgtttgggtcatcagtggaagggtaacaatatttcaaaatattgatcacacaaggccaagtgtagtgtgtgtgtgtgtgtgtgtgtgtgtgtgtgtgtgtgtgtgtgtgtgtgttttgcatgcatggttatatgatagtatatgtgtctgatatgagcatgtgtggtatgtgtatgtggtatgtatgggtgtgagtgcatctttatgtgtgtgaggtgtgagaatgcatgtgtaaagtgaataaatgtctatgatatgagtgtgcatgatatgaattaaatttgtatgtgtggtatgagtatgtgtatatacatgcatgttcatatatgtgcatgtatatatgtgtgcttacatacaaaaggagaatgatcagatcctctttttgaaaacagaatcttagctctagattaagaagatttttttaaaactaggaattaaagttagagaagttgataactcattaaaacctttacagagcaagaattaggacctaaattcaatctccagaattcacataaaacaaaacaaaacaaaacaaaacaaaacaaaacaaaacaaaacaaaacaaaacaaaccaacaaaagcaaaagcaaaaaaacaaaacaaaacaaaacaaaacaaaacaaaacaacccaaaaaaacaaaaacaaatttagtggcacacttgtactccccactctggataactgaagctgggtagatccttagacctcgctagatagccagcctatcctaattagtgatccacaagccaatgatagactctgtctcaacaaacagtgttgacatcctgatgtgacctcaggcacacccatacatacaaccacatgtacatgtagcacaggcatacaaataaatacatacctacattggtaagagtttataagtgagccaggtggtggtggcacacgtctttaatcccagcacttaggaggcagaggcaggcagatttctgagtttgaggccagcctggtctacaaagtgagtttcaggacagccagggctatacagagaaaccctgtctcgaaaaacaaaaacaaacaaacaaacaaaatatgtatcaagatccttggaatgataccggggacacagtaagacttgtgttcatgttggctggttttgcatcgttcttgttagtattcacttcatcatagctcacatcttcctggtcttcccttatcacctgtagcagatattatagctcaaatctttctgttacttctcccagaaattcatattgcaccttaattcccagtaaaaatacaacccattttgaggagtgattaaatcataatgggtttaccctcataagtgggctagtgtgtgtgtgtgtgtgtgtgtgtgtgtgtgtgtgtgtatgtgtgtatgtgtgtttgtgtaataaaatgagcatgggggtaacatgtttgttctttatttttctggtttttgccatgtgaaagcacagcatctctccccataacacagtacttttcaacctgtgagtcatagccctgattatcagatatttgcattacaattcattacagtagcaaaattacagtttaagataacagcaaaaataatgtaatggttgagggtcaccacagcacaagagactattaaacagtcaaagcattaaaaaggttgagaaccacagctttagaaagacacagccacatgggaacagaagacaattctcttcccacactgagtgttgattttggctgttctagcctctagatctgcaaggaacaacattctgtcttttgtgaatcttgtaaatactcttgagtattttgctgtcacttgacacaggagccatgggatttagtcaacacttaactgttgtggaatgtaatgatactaatttgactgttgagaacttgattttgatatctggatttctgtctcagaaggctgtctagaagagaaatatttatcccataacattataggatgacatcttctgattctcacacagtgggtgtagaagggactttcagaaaattgaaacctcaagactcccgaaaactggactgaataatatacccttggctgtctctgcttctttgtgagtctgtaccagtattcttgctgtgggggccttgtctgcctcaggttgggtcatataacaagttaatggaagtttatgactattgaattagcttaaatcccagactgctttctttttccatattctaattatccaaggaaatgactgtggccttgtggggatcgggtagccaagcttgatgtcttagtacacaaactcagccacaactcgtcattcccttggaagtggcaagctaattccaagtaaattgatggacagaaggtgctactgacacagcaaaattaagacatggcccctgcccttcacttctcattagggtcaacactaacaagatagatctgcaggaatggaaagccacagcatatagcccttcctctgttctggaaatacgaaaacaatggaccaaatcagaaagcttgctgggaaaaacttcagcgtgccttgtgtcattgagtttacatttcagtctttttaagacagttgttgtcatagcactttctctgtgatttcaaagaaattgtatttctgggtcttcaattcgcctcagtataggggaacgctagggccaagaagtgggagtgggtggggaagcgaatgggggacttttgggatagcactggaaatgtaaatgaagagaatacctaatttaaaaaaaagaaatttctgttataataaaatattttgtgttttactttaaaaaaagaagaaattgtatgtggatgacatacaagctctgatacacttgagtatggtctactctgcttttcatgatcatcttctgtgttgtatggctctgctcactgcctcagcttttaaactccagcaataatggactgaccactaagtgactgtttttctaaaagaacaattgatgccaggccttctaatgtatttgtttccttttccattttagctgtacttgtacatgcagttgattggcatctggtttcccaacagaaggtcaactccaagaactccttaccctcagtctagtgtttgctgcctaatgagtactatctgtatgtttagaatgaaaaatgcgtggttagtgatggaaggaacctctgaagttttagatgagagccagaggaagggtagtaacaggtcttccagtattcaaaagactacttatgtttttctttactattttaagttaacaatggtattattgcctcttagtaatgaaatttaagactacaaatgaatggcaaaccattgttatattctcctcctactcaggatcccacttccagaggttagaaccagggtgttttagatataggtagactatcttttatccaaaatgtctgtggccagattatttcagatttaactgtctaatttttagaaaatttacatatatttattggttatacattctgaatccagaaatctaatatgcaaaataacctcaaatcctaaacattttgagtgatatattatagcaccaagattcatatgctgggacagctcaagtttcatattttcacattgggaatgttccatacttatctagtgtgtacatatacatatacacatacatacacactctagggagtctacaattttgtttgtaaaaaaagtggtcatatgctataaagcatgatattttttattgtagggaatggtgacaccctccttgtcagtaggttagtgtgccagatataacagatgatggtataaaagtgtggtatttaaagccaagagatagtaatttactcttcttacagcaaaggctggcaccatcaatgttaaaaactattcagatatttttaaaggatggtttggaattggtatagtccaaatctggccctctacctgtttttgtaaataaagttttactgaaacatagccatacttatttgttcattagttgtctctgagaattttagtggtttaggagcagaaataaattgttgatatacaaaccatatgccctgcaaaatgtaaaatttatgttccaagtcattatatttttatgatcttatgcctggactatgaggacctggtccatctctgctttgtaggccaaaagccacataatattaaagatgatttggtgggctcaggcagtttgtgcatacactcaacccaggtagcttttattgatgttgtagttgcctttttctcttggaaagtttttgacaggtgattctggtgcctggaaaggagacagggaagatgcttggcatgtattgttgttatcagtgtgatttctttaattaggatcttatttacatttctcagaaaaatacacgcatgtatcaacataccctccacatctgtttgtttaaatggagtgttcctggtatatcactgcacagttagtaaaccacagcataattaaatcatagcccacacttttcagcatcagtaagttgcacagtatgtaaagtatatgccttgggtttcctgggtaaaatttattcacagtgaatattgacttagtacttacttagcctctatgtaatagaaatgattaaccagttcgacattattaccaatgaccagcaatgcataggattgatccagacttgacttcatcaatctgggttccttggtgcagtgagagggagagtgagattgagtggcagatggagaagattccgccccttgttggtggtgacaaggccttattgacaactatgtgctagggaatttttgccaggtcagtcaaaataaagatcttcaatttagtaagtagattgcagcttgagttttaatgtggaagacgactcttcaaatttgtttaaaatgcacatccaggtctcaggcctgacacccattttctttaaacctggctcatggcccaggaatatggtattctataaaaacctctcaaatgatgctggtggaaacatctcaggccaaacctggacaaacacttaactcactttgtgtgtcttctacttttcaccttttatatcttacatggcatggaccttgacagacacatgtgcattcttctgtccctacaaggttatgaacagagggacaagaataattgtatagtcaggaagcagatgagagctcttgtctccattttccttcttaccaattactcctctttcctggcatggctccaagtctgctattctctgtactctcatgtacatagatgtttgcatatatgaaaaccactggacttggttatggtaaccatgacagcttatagtaggttgtaagccacagccctggtaagcagtatgatggtctttctggatgtgttgcttctgcctctcttagctccttttaagtcctctggcaggtttccattcctcatgcattttgccttcatcacgaatattctgcatgtgatctcaggctgcctggtggttccatgcagcttcaaacagttgcttcttcttcagtgtctgtagttaacactgcagctgacaaataaataggtgcttagtagatatttagtgaatgaaagagagattaggaggacggtgtagagcagagaggtgtgggaaactttactagtaactaaggtgacttgaaagacagcgctatcagatgcaaattgtccttacctgaattaagtctatgccttatgaaaatagtttcgttcaagttttaacttatatcttgcagcctttctcccttctggaaagtgtccctccatccccaaacacaatcctaaaacacaaaatgcatgaatgttgtcaaatagggaatgagattttctgttttcaattttcaaaaatcagagaaaatatctaaagaaagtgttttaagatataagtgacctattaggaaacttttgacccctgggggtctgagttaatcttaagcacccacagttggaattgtccaatgatgataaagagtattgaaatgataaaagacagtttctctctttgaaaattacgcttgagaattaagctagttttagttatcaatattctattcttaaatgaaagtaaatgatagcttacaatgtttaaaaccctttgaaatggaaaagggctgtaattaggacattttcatcatgatgatgacttttaaataatgtaacactgtttgacacttgagcatatttttagagctaatgcacagtaaggactcatccttctgcccttattcattgtctccctttcagttagagatgtcgggctctgggaaagagtgccatttctggttgcccagggggttagtgtgagttggaggaagaactgagaacttggcagtggaagaagtaactacatctcactactcatttccttcccacgcagcattttgttcatttgggatgaatagtttttaaaacagagagagagagagagagagagagagagagagagagagagagagacagagacagagacagagacagagacagagagacagagagagagacagagacagacagacagacagacagacagagacagagacagagaggcacagagagagacagagacagaagagacagagagggcatgaagtaagaaaaggtgacagggagcagcaaaggacaagggagagaagagcctaaagaaggaatagctgagagagcaggggcctagggaggctcctcaagaggaaagactatttttaactatctttacactgctttaaaattgaaacctcaatttcttttctcaaccatcttcatccattgttgcttgtatgccaccactctggaaaaatcagtgtgggctacagttgtgtagacactctcttattattaaaataatgagaacaatagacccatctaagagcaggtacatcattgagccctggctctgctggttcaggtgatcttgttggctctccacttgtcttctggctgtagtgccctctaggtgagttgatctagttaagattcactgagaaggaatgtagctacccttaataggagcttgggagccagatcctgggaagtgggcttcactgcaggatcttactgctcttgtatcctggtgaagcttgcctctctgcactttcagaagaagcggagactctctcaattcccctcctctctcttgctctctcttttctgcctctctccttctctccttcctgtcttaacttttcatcctgaaataacattaaatttaaaaaaaaaccttaaaaattgtaaacgtgctataaagaatctccttatgcttatgccctgacagattttccaggaattaatggtttatttcactgtattctttttctatgtttatatatccattacaaatggatacctttctcttgaaagttttgaaagccaagcctcagacccagtgctgcctttgctataatgtctagtgtctgaaatcatataattggggtctggagagatggctcagcaattaaaaacactgactactcttccaaaggccctgagttcaaatcccagcaaccacaccatccgtaatgagatttgatgccctcttctgcggtgtctgaaaacagctacagtgtacttacatataataaataaatcattaaaaaaaaaccctttgctgatgcatcttacctgaaataatacataataataataataatacctaaaaataaacaatagtcttacactatcaacagcacaactatcaacccagtaaagtcacgctgattcaagctatttgtcatcctcaaaccttacgaggacgtgacttcttgttccattgattgtcatctagatcatgatcacatgggtcacagaggtcacactcattacactgcatgaatctgtcctgtcttcatcttgttcactctcaaatcattcttcagaatttttctggcatgacttggacaatttggagaagcatggggtcctagatttcaataatgttttttaactgggtgtttgatgagatgtttattcctgattctaatcatgttcttcattcatttctagcaggaatactgcagaaagggcatcatatcctccttgatgcccaagatctacttgcctaatgcttaacattaattaattagttaatatgtatatcatgtttcttcattggtgggagatgttattcattcattgaggtgagctcacaattattttaatttttaaatgaagtaaaatacttttagaaaaaaatagatatcttatttgtttatcattttagccccttttaaaaaaaaaaccctttgctgggggctggagagatggctcagcagttaagagcacagactgctcttccaaaggtcctgagttcaaatcccagcaaccacacagtggctcacaccatccgtaatgagatttgatgcactcttctggggtgtcagaagacagctacagtgtacttacatataataaataaataaatcttaaaaaaaaaacctttgctgatgcatcttacctgaaacaatgactactattaatattgccaaagagtacttttctatttaatcattgcttatttgttactagatattatacaatgagggagagccagccatcctctttatgttaataacttaaattgtattgtgtacatttaagatttacaatatgatattatcaaaaaacagctagataataaaatggttattatagtggagccaggaacaaattctccagaaggctttcagttcagcatcattacctcatggcatgatttggggtagggaactctaaccttctaccaaaaggaacataaaatgagaacctatgaagaaaatatgaatcattttcaaaggtgaatccttaaagaaagaaaaataggcttttctgggtttttggcacatcttatggagcataacaatactggacttcattatgaatattttgaatatttatggtgtttgatgtttggactttttaaaaggtcacttgaaaatgaagtcactttcatcttcaagtagaagaaggtgaacatgaaaaaggaagacctcttaatgaaagctgctttatctattctcctgcaaaaggtcttctcttcctgcagtaattgtatttcctaatggttttccttgtgtgaggtgattgtgctatgacatagaaaatatcccagtgccaggactgagaaatttctgtgacagttgacagtcacacttgtctggggctttcctttaagccatgtgaccattgcaggtagtgattaagtagatcacatgcattctctcagcaccttttaatgcttgcttttcttagtgaagatactttgtatagaaccgaggaccatcagtttaaactatcttgataatagacaggacagaattgtagacattaagagttttagtacaatcagggagaacttttgtctcattatctttgactcatgggaatgctacacttcaagactcagtccttcttttagcatctttatgtcttgcataacaagtgacaccaattccaatatatatatagaataccaattccaatggatgttccatggtaatatatatatatacatatatatatatatatttttttttttctggataaactggaaaagactacatccagatctaccagctgttagtttcaccccttggtgcagaaatctgacaacacaagagattcacaaactcattcaaccactgcttttagaaataccattctaaacaaaccacttgaacaactaagagttaaatgtaaatggtttcataaaattcaattatattatttttttaggtggtgtatgtagtggtttgaatagaaatgatccccatagacttgtgtgtttgaatgcttgacctataggtagtggcattattaggagttgtggtcttcttggagtagctgtggtcttgttagaggaagtgttcagtgtagtagtggtctttgaagtttcgtatgcacttgttctgtccagtgtggaaaacagtctctttctactgcctgcagatcaagatgtagaactcttagcttcatctccagcaccaagtctcctgcatgccactatatttactacaatgatgataatggaataaacccctgaaactgtaaggcagccctaattaagtattttcctttataagaggtactgtggtcatatctcttcacagcaataaaaccttagcttagacaggtggaataactaatacttgcaaagtaagttggtgagtcttgttttccctgtgatttctcctgggctttgtacccgtggatcatgggcagagcattagtcacttgtttttactgtaaagaatgtcacatggactttgacgatattcccctcactttgcaccgagtaagttttttatctcttgactttcctagcaagtgtgtttctgctttacacaagtcctcttagaccagattaagaatgctttgtgtcctagatccaaaaactaaacttttacctatttctggtcaaagctgctttacttctcaatcgtagtaagggtttgttcttccataggtgacattcaaaatgatgcccagaaatactcagactggcaatcatgttggcctaatcttaatccataaatgtaaccacaatgaattttggtcactgaagtttccaggaatggtcatccactatttttgttccttcctgtcttatattcagtgctgtttgtggaagggtgtcaagtactctgagaagctaagtccagtggccttagaaaataaatcatctcatccaaagaaaacctaatgataatgtccatagtttccttgagatgatcgtttgtgaatgtggaattcaacataaatagaggataatatttacatactggaaggggaaaatatcagggcaataagtaccagagaaaaaacgtcagtgggtttgccaacaagtcatagcaagttcttataggacattccatccccactccccacccctgctacataattccaggacaatcataagcagtgacattgtccaaaatctaaccttgaagtgggccaggtgtgatatgcaaccccttagagttgaaggttaatttccaaagtcccatcatttttgaaccaattgttaatgactaaatcttaatttggtcccatccaggggtaagatctgatgatatatatccccaaaggtaaggagccacagtttctatcaaaggattataggatattattacatcgttaagaagactaaatataggcataggaagtgtaacactggaaatttagaaaaaaataaaaatcaaatcatttattctgattattagtctgtgagatagctcaggttggcttatctccggatgtgggttgggtttatggctttcattctaaaaaataaaaataaaataaaaaataaacctgcaggagctttgatgtcagcttattgtatgaatcaaatattaagcttctagtacatcatatctcttaatacagtattgtccaagtcaagaaaatggtcagaaacataaataaacgtatccctctaggggactagcagaagaaagaacctgaacaaatacattttcatggaaaatgccagcctgtctatccaaggagcatgttgacaaatagcaggatttagatccttaaagaaccttcagtcacacgagacaggcttcaattacatctgcaaataaaggaatgaattttccctggaaataggagccagtgaaagttcctgcccaaaactttgagcaggatgatttgagtatcttttgaaacaccaggtgtagatgaagaataaaggcagcagacagctagtcaagggctgaagaagacactgcagagtgcaacagagaaaatcccccatccacggtagaagggagctggggcttccgatctgaaagagaggaaaagtgagagaaatcaatccacatatgtgctgtggtcagcaaagggagatctggaagcgtcttgacacttcagttactgagtcatagatggtggaatatttcccatctttgtcattctgtgtactttataagataacaaagcagcgttttgagtcaaccagtaccctctccaatagctttgtcatctacagacttaaatgtgacacactgaagtgctcataaaactgttgaatcttgaaaagaccattcttatctacttaatatgctaaaaggaccatcttttcaaatattaggtggggtacaatatttacctgtgcagttaataagcaacttattaacacagacagtcacttgaattgttaattgatgtttaatttttaatcacttacacctggagacattttcccaataaaaaaaagaacacctaataatttcaactccaggcaaataggcattgggatttttattcaagaatttttaagtaattgtgatcctctttaatccccagggtcagtgctataatgtagtcatccactgagcatgtattgatcatgaacttagaatagcagaactcatgtgggattcaaagaacaagatagttagatctctccactcaagcaccagacactccagctgggaacagatgtagctgaataatgagtactaataaggtgtggaatactggtgctcacagtaggagagagcagaagatgtaggacactggagaaggtagaaagctgaggaacagtagctggaggtccaggttgcctgtgtttgaatcctcactgactttaggacatcatacctgcctgcagcttatccatctataaacagagaccttagtgactttccttaaacaagttcatatataaaagttgtgaaccagtgcttggtatataagcaagtacttatagactcttgggttttcttgtttacagagttgtacgtctttgggtagtaaaggcgatggcagccctctaaccagatcctttgtatgatgtagcattaataactagtcatccaggaggtgtcttcccagttctaaatgaggttaactggttttgcatatggcatattgcagggaacattctagaatacacttagatttgttccccttacagcaatggtgctgtccttggaataactctttgctatgggtagactcaggcttgatggcattcctggcttctgtgttttcattttgcctccccttccagactcgtatccttccttcctggtgtacatgtgtgtggatgtatgtgcatgtgtgtgaatgtgcttgtgtgtgtgcatgtgtatgtatgcatgagagagagtgtgcatccatgcatgcatatgtgtgtctgtgtgtgtttacgtatctgtatgtctgtttccatcttccactcatcgttgccatttttgttatcctatctttggaaagtcagttcccaaagccaagggctcaagacttggcagccatagctgtcccccttttaatcacttatgcctactttgctgccactagtacacagacatacatttgtccaggtcttaccctagggaggctgcttaaactgcacttggaaggggaacaacagtcaagaatgtagggtgtggaataagagtcataaaggtgaaggaggaacaaagacagacctcagcagtatagaagtcatctcatcaagaaggaagaaaaaagccaccaccacgacatcttggctgcccagtgatcacactgtgtcaactgaacatgccaatgtaatgtttttagtgttccgcataaaaaatgaaagacagatgagacagattttagtgttatacctttaaagcactatattaaaaaaaaaaacaggtaatatgagtaattaaaaatgcagcaaagtaacacttttacgtgtgtattctggtattatctctgaattcgggtttgtattttatacttctgcattgcttcactctgggatagtcccagctgagagacacatgcagaagcagttgtgggtgatagctactcagaggaaaactgaatggtaagcaaggaagagaatggcagagtgagtgaggaattccacagacaagcagatgagaaatggcgttgcttaccatgttagagcagatgggaggttactaaaagaaagcaaaacattggttgtgaactctgtcttggcttcctgctttcccattagtgggctccaggcatactctcccttcttcttttgccccatcaacacatggttcttttttaaccttttattttgatgtaggaaaaaagtcaaccatttttaacaacagcagtgacaactaagccttttaaggaatatatccaaatagctcaaggagaacaactggagaataaaactcctgtagagtcagggaaatacctttccactagtgttataaagaagggccctgcctttctttctttcctaggcttactaggcatgggtgggacttataaacggagttgagtgttagagcccattgtgggcatcctggaagcatccaaggatgctaacaggatcctcaaatattcattgttttttctctgatttaccttcaagagtcccttgggatctattagttgattttctctatatgtttcaggtatcaaatgacctcaaaatagcttagtaatgaaatctactgctaaaacatgctctgctttgtcactcaatgacagtctgacatgtaaaggtgccaagttactatctgtagaaagagtgagtgtacaaaagagacaagatatcctttggcttacccatagtaagattaagaattatagttttatattagcagtatggtgtaggtatggacctggccatgtaagaagatataccatattctgatatggcaacctctggaggcagagggaaaagggaagtattcttggaactcttacaaaactgttgggacagctgcaataatgaggagagacatatcacagacatccattataactgatgcctatatcaattcatacctatacagggactcctgtatttttctcttgggtaatctagggcactgtagaggttttacccctagcattctgggtgcagttattacagaacaatatggaaagcatcttactaccagtgacaactagaaaacagctgaggtatgcaggggtgacccctagataagcttggaatgttacttgagcgatgtgacatctaaaccatccattaaggtgtaaggacaagctgaacaagtggcaagccagaaagaaagtatgctagatagagcgctcttctgtgttaaagttttatcttctgtccctgcataatcacccatctcttgggacactgtgtatttggaagagctctggaaggtggaaacccctctatgaatgtaaatcataattattttatggattctgtttgagggaacctaacctgaatgatgggtgcatgggatgaatatttgataggcagagaatgtgagctacagaactgacgtctccctgagaagggcctttaccagaatagcagcaaacctctccctgagccacagaatccagcgtgttagagttgactgaattatttaatataaaaataatgtttatacctgaaagtctctctaaatatatgctttgtgtgctatcttggactggtttcctgtgtgggcatggaagtttcctgtctctatgctggatccatgttcttgaataatgttttatgtttaatgtagtgtgtgtgcttggtggatgtatgttacttacagtatataatagaattaggtagattatattaggaattttattttaagcaatgtttcataaatcataacaagttgggaactaaagtatatataacctacttctgaagttatgcggtatcattttgctgattggataagttttacaacatgactaatacacaaacatttcttgttactaaaaaaaaaaaagtaactcaaattctaccatataaaacatactattgctttccagcctacagaagttgtcctgtcagacaatgtcaggccattctttatgcctagttccttaccagcaccctgtgtatacagtgcccccagtgtttgatcataaacaggatcatactgttgacactgggctgtgtttcctactttgccttacgggtatgctttgacattttgtcctactgaatcatccactcttctcagtaactatgtagaagttcataaatgaaagaaccgaaagttacttaactacttgtaaatattactaacttagaagcagcatagcaacaaacatccttacatatatattttatgaatattaattttctcatctagcagagattctaagggcattctgttttgtgcaaagaataaccattttgttaatcagccatttcttttgggcttttgttgactcttaattaaaagtcaggtatagaaaattgtttttcattaagcattcctccttagaagcttcatatttgacaacttaattgtgaaatataaatgtattatatgatcaggtttaatatttcatacacatacagagacactcattctcacggtttctgagctggggctagaactcactgataaaatgcctatctagggaatacaaagctctagttgtgaaccccagcaccatgaaggtaaattaacaaatgcaattaggaaaagtataagagccaggggactagaacagatgctgtgaggcactgtcttctaaaaagacacaaggtggaggtgatctgggaggacttggggggagattatggtcaaagactgttgtatgcaattctctaagaattaatatatatacacatctctatctatagctatttatctacatatctatatttatacctatacctataaccatatcgatctatctctttctttatatatatagagagacacacacatatatatcagattctaaataagatatgagactaggattagtgtttgcctagcatgcatgagaccatggttcagtactttttacagtaaattaataataataataattacagtactgactgagtggtttgtacttcttaggttagagaatgccctgaggaaagtgtaccctgctaattaacatgtgtgtgtggttccttctgcttccttcaccatttatgtcataactttagtcatagaagactctggactcatacagtaatgcacacaaccaacagtgggcaaccatgctgcctggaattctctattaatatttttatcctttcctgttcagtgcttcccatgtaactctggatacttgagtgccatgtcaggatcagttatactatgctactgagaaaattaggaaccattttctcccccttcagaaaaacaagtaacgtttttaagcttggaagtcaccattaaagctgtcgataagtgttttgtcgaatgaacaaatgaagaggtgaaagtaaaacaaataaaagtaaatttgtagctctttagaccatttcctgtatcagtcactgcccttccaagtctcgctgtgagcctgctgccacggtgggcaatgagcagggatgcactgcttaattggggcatctatctggataacaagctttcactgggtctttaatgatggagtggagctgcagggtagaaattcccaaagcctgcaacattggagctttcactttcactcaaaggaaagagaggagctgctgcacaagtgactttagcagaatacaaggccttctcagattgatacccaccaaacaatagcagcaattgataagctgtgataggtcccatcacacatgagagttcccatgacagatgtgacttacaagttcatcacactgcctcaggtgaggaggaaatcagataaagtagcatgctgtttatattctccagttaggtgagagtatgtggtttacctgaccatcagctatttacacgtgttaaatatagactctaaacacgtatactaaaaagtatgatgcatgtatggagataacaatgaagagccctagttagtacaacattattaagtaaggaagtgaaaataaaactcaatggtaaatcccaaaattcctttaaaaacaacaacctcccacccaaacaaacaaacaaacaaacaacccataattgaggtaacgagaaaatggcatgatcttgaatatcattaggaaatttattctaattctagataaaataacaaaaggtaggagtggacttggagcaataaaatgcatactatgcatggcagcaaattaataatgatagaaattaataatagtttcgaaaatgagaacaggtgtatcccgcatgctctcatgggccacattttagcttcagattcaggcttagaaactcctccattaggctggttgttcttttttgatatatctcagacaacaatgcagaactcttatcaagagtcagtgtggtgtgctgtactagaatcttgctatggttttgcttgaaccccatctccagcacttacaaaagtgtcatgtggggtgtgttaagtgttacatcttcaagggtcactttcttcatatgggatggctttcttgacaaaaagaaaattacataatacttgtgatgtgtccaacacagtcaatacttgaaataattgatagctctttgtacaaatggttaaaggaataataaggacagattgaagtaggattattggcagatatgaagggtgcagcacttgtccatgttaatttcttcatcttggggttgtgggtggggatggtcgggagtatgatttgcttgatctcatgttttctttgaggggttgcgactctgcagctagcacagctggagaatgcactcttgatgcacatctcacatggcagcttcctgttagcctttccctccatcatctcaagcatgtggttgttagtatgcattgtcagcctgacagaatctaatgctatctggttgtaggcctctgagcatgcctgtgggggagtatcttgattaagtaaatcagggtggaagaactacccacttggagtggtactgtttttgatgagatctgaactgtgtatacggacaaagagggctgcagggcatcatgaagtcatccgtctctgcttcctgattatagatgtgatgggcacagatgctccaagccttcccctgtcacagctcccatcaactcccagccatgttatctatatcttaaagtgtaagacagaccctttctccttaagttgcttttgtcagagaaatttatcccaacaactagaaaagaaattaagacaggaatgttcatgatgtaatagttgtttcgacttatgtcaaaactcaggagctactgtgagtagtaagaaaagaaattatgtcttctggtttaaggtggagatgtagtaggagagctgggccacacctgatgtactattttccttcattgctgccaaagctagaatctacagctcagggcaatgaacttcaagataacaatgttaatccaaatgtcaaagttatacttctaaatatcatggttttagcacttttagataatgactgtattttcatgtttcatgtatatgtcttatttatcttagtcaaataatatgtgcatataataaccagaaagaaaggatgagaagagaatttccttccaattactctctgccttatgacctactatgctcttgtcttctaaatagtaaattttcttttaacttttctcgaaaggactgatgaatcttgtcaacttgcacactgatcctttccagttttccttattgccacagccttgtgtacattcttcagacctttctgagattgattcatgctatgtcttgaagcacaggcttgacctgcctcttggctctacacatagctttgtattgggaaaacaaatccatgtttaacctaattgctgatatatggacctccctgtatattttattgttttgttagtgatgggtttcaaagctaaggtttcatgtctaatgagctatatatatgtagaactacagatatataggggtctgtagatgacaccttatatatttgagcataattttgtaattcttaaagggttaaggagtttttaaatttcctgtactgagactagattggcgggtgtccaacatacaaaagtttccttcctgacaaccagggaataaaagcttccttcttcttctcttttccctagtttcacttcatgtcctctcagtggatctatcaaccatttgaataccatgtctgtgaggtgaaactgagttgctgccctttgtgggtctgaataaaaataatcaggtgtcattaagagagcatgggttaagttaatgtttgccttacccaaaagaatttggattccctttgtacctgatttataaaatctcatatgggagagtgatggagctggagtatatcagttttcttaactggttttcctgtgtttgatcttgtctagtaattgtcaaactgacgcagactatcccatagtgacaccctcagtctatagaaaccaaactgcagttgtcttgagccatcatttcccacagctcatgggatgtaaagagttttccacactcattgcagatttgtgagggtgtactttatctttttccactttttccactttttcctattcatgtatgttaaaatatatttgcctccattcagtaggatttgcagtttctcttcattttttcccaataacctgccctgctgggcatttttgttgtctatttcctcttctttacttctattacttctcttgcatcttcttttcacatctttttttttttgtagagctttgtgacaagagaaaagatttttgctattagaccattttgcacccatgttatatgatgtttttcctcttcgtccttcatcttttcccttcttcccaccttgaaaatgtcttaactttttctctactgcttttatgaccactggtgtctttgcttccaatatttaactctggtgtacttcaaaaggcaagtttttcaaacaaatttcacttctcctccaaaagaatctttaaaaaacaaaacagcaattaagctcctgtttcattatccctctttaaatgtgctatcattctttaactcacagcctgagcatttcccttgtgaaggccatgtcccagagttcttttcagttttaattggctgctgtttggttttgagctatacagtagaggaatgtggaatgtcttcttaaggtaaatccattgctcttataaaagaaagaatattatcttttattaaaaataagttttatccctcctggtgtaaggtaagaaactcatcttttgatttttcttctctttcagtgatttagtggaggagtggtgcatcttagtgggattttttaaacattggaaagacaagcatcaactacatagcatgatgttgcaatctgaaagatatctttattaaaaattattattgttgttttgttattattgttgttttgctattgttgtttagaaaaaaagtctctcttgtttgttttcctttttctgagttcccctttgagtctttctttttctcactctcctacaccagacctgctgcctgttcaggttgaaacttgtctccagtgtggttcatgcctatgtgtgtatgattttctgtctgcttttctcccagatgacatatccattcatttgaaagaaaacatcatgtgtttcgtagcatctgatcagaataacagtgaaaatttcatttaaaattaatgcttcgagcaaagaagcttctctgtttacttgccttgcaatattttaatatttaagatgctatgatgaaaaacttgtggaagaaaaatctcctggtgtgatctcgttgcctaacaatttacactcagctgtaatattttatttgctataattactctctgacaaaacagaaaattgaaatgcaaaactacaaaatgctttctgtttgcatcttatttcagaatgtagggggaaacccattcttgggggactgaacataaaataggaaagcgaccttcatcagacaacagggacacagtaggattcaaaccaaaggaagccgtgggctgccaaagaacactgtcagaggctgtgtgatgtgaacttgaggttggagtgtagggcagagatatggccttctgtctctctctggaaagtctccctctgacttttcatgagtccttcctccgtgtggcgcctgtgtgtctgctctcagaccattgatgctgcttttatgaaaggtgtcattccacgggactcttgtgacacgatgcccaggactgctgccctttcctcctctcgttatttgtcatcttgaaagacacaggattcagtgtgattgtgggtctaagtagaacatggcagctaatgcgttgacatcatgtgtcaaccagaagccctcttgatttcctctgccaggaagaaagcccttcttgcattcagagatggaagctctcatatccgcctagtggctcctttccctgtctacctcacccttgtttccactttgaaaaatgaacagcccctgtgcgcccgggattcagaatagggttaccttaggaagtaattaatagaggaaattgaaacaagagtctttttatgattaaatttaaacaagtactttccaatcaaaacaaaggaaaacattcatttagtttcacaccaggggcaaaaagttatactccattttcacattttgaaaaatggctgacagctatgtactagatccttgcagtgcaaaatctcatttttctctgaaaagtctacagttcccccacatgtgcattgagatttatctaagttattgaagaaggtggtatgcttttgggagaaactttgggaaataattgaaaataatcttgaacagttggcagtattctaatatttctggcatgtaaagtagttaatgcatgagattagtcactggataaactgtgtgctattaggatctagggcaagttctcaggaatagagaacagtattagacagtacatataaaaacatagttttctctaaataatcaataacactgaatttagtaatacgtaattagtccctgagtattgattttatgatataaattcattttaattggatttttcatagctaggaagttgattctgtcctgaaggaattttgtttttcagaaaacttttttcatataacttgaatgtggattttagtaaacatttcattttaaaatatgaattatgcttttcagtatgtccctggtttttgtttatggttcatggtggtttcttgtttccccggggctagttttatcacttgtctgttaacatagtcctgtcaatcacaaagaattgggtaaatatcaatttctccccaaaaatgttgatgtgctatgtatcaaactggagagaaaaagtgtgtggtgtacaatttttttatttgatattttctttatttacatttcaaatattatccactttcccggtttttctttggaaaccccctctcccatgttccctccctctgctcctatgagggtgttcactcaccctcccacttactcccacctctccaccctcacattcccctacactggggcatcatgccttcacaggaccaagggcctcttctgcccctgatgcctgcctgacaaggccatcctctgctaaatatttggctggagccattggtccctccatgtgtactctttggttggtagtttagtccctgagagctctgggggatctgggtggctgatattatttttcttcctctttagctccttcagtcctttctctaactcctccattggggaccctgtgctcagtacaatagtacaatggctggatgtgagcatctgcctgtgtatatatcaagctctaccagagtctctcaggagatagctataacaagctcctatcagcatgcacttcttggcatccacaatagtgtctgcatttggtgactgtatatgggatagatccccaggtggggcagtctctggatagccttttcttcagtctctgctctgcactttgtctccatatttcctcccatgagtattttatacccccatccaagaagggcagaagcacctacactttggtcttccttcttcttgaacttcatgtggtctgtgaattgtatcttgggtatcccaggctttggggctaatacccacttaccagtgagtgcataccatgtgtgttcttttgtggttgaattacctcactcaggatgatattttctagttccatccacttgcctaagaattttatgaagtcattgtttttaatagctgagtagtaagtactccattgtgtaaatgtatcacattttctgtatccattcctctgttgaaggacatctgagttctttccagcatctgactattataaataaggctgctatgaacatagtagagaatgtgtccttattatatgttgaagcatcttttgggtatatacccaggagtgacatagcttagtcctcaggtaatactatgttccaattttctgaggaaccaccaggctgatttctagaacagttgtaccagcttataataatacctatggactcattctcacatccctgtatatgcatcaaatagctataatattataatacaatttaaaaaatgatctccatggaaaatacaccataggagttcctcacaggatcatgttgaagttacactggtttgtactgaacaagcagacagtaaacttctgtgaaaggaaacaaaagttattatatagctgcatcaaagcttttatggaaaatgcagtgcaaccttaagctgaaaacagtctgtgtgcaggtgccctgagcctcatggatgcggggcatctctgctatttcccctacagtggttggactctattgcttacttcatttctatacgttgggaacgtgggcttgcacttggccattccagtctataacctagaccttccaacctgacctcttgccacttgatgtatttccagttaacactttcaaggacaatagagcatattttgttgtattttatggaatattttatgtcatgttgtgagtcaattctacaaatctgtcatgttcttccttcctgctggacttgggcacatttgtaggggtttcttcaagcaaccaaccatctttgtggtttctaatgttggactggggttgatatttctagcttagacaatccttgttgtcatttataggtaatcagagcaggatttcaatgaagagccttataatatgggaatacatagctcctaaataagcaaaagagcaggaaatatttcattaagattgtaaaatatacttcacagaaaatttgccatcttaacaattttctgaaaatcattcattgacattgagtattttcagtgttatataacaattttggttctaggactctaacattccaagagtgtgcacatgtgcgtgcatgcacacacacacacacacacacacacacacacacacacacacacagatatgcattcccatctacactccctttttcatgtttccctgcactccttacctaaattgtactctccagtttccatgagtctgatcattatagagctacatcacaaagtgttttctttaaaatcttcttaatcgtaaaaatcttttttttttttaaatcttagggaagtaagatgattgagtcaaatcctcgtgtatcccaacctggcctcaaactttccacagagttaaggacaccctgacctcctggttttcctgtctctatctcccaagtgatggtttgtcatattttagtaaacatatttaaagtttaaccatgttgtaatatgtcagcctttcattcattttcaaggctgaataatattccatgtttgtgtatgttgtatactgtgtgtacagagactagcatttaaaactgggctctaatgggcaagatactgtggcagctacttgttggcaccaatgattataagatgacaggtcaacaggacttacattgttggtcttgttcccaactcatatcactgctggaacttggattctaatttaatttcctgagctttctcttcagctatcacaaggataaaacaatccctcttaaagatttgttctctggtttctagaaaataatgcataggtatatatagcataactcgtggtcagtgttcagaatatgcatctcactctcactctctttacacatgccaccagtgacaaagagggggtgaggggcaggggctcaggagatagcagagagagttgcttgagcataaagcagctcctttcatgtcttaagcacgtattcctgtctgtttatcttcatctttcttactctgtccatcagagccagctctgtgaaatgactgagtcctaaggaagcacaaatcacatacatgcatggagctgcctggaaagggcctgcagcacatgcagggtgggcatgattcaaactgagctccccggagaaccgcatttattgcttttggtgttcatttacctgttggatctcaagtttgttcctgcgttacgtaaaacatccatccctttggcacattggccttcaagtatgaattaatttttttcaggccaattctctaaaaccctagtattaagaaggcagagagaggcaaggataccattcctttgatgccagcctgatctctacagagagaatcttgtctcatcataccaaacttgatgctaaaccttttcctgagtgttttgtgtggcatttttcagataaccaggacagggaaaattctgcttttatctctgctttcttttggcagttttcagtataatttttcttggtgcaaacatgacagcaattaatgtctgtattgcaccatcaggatgacaaagaattgaccaggatcttcaaaaatatgtctgagacttagaaggaaaaggtctttcagctgctattggtcagatggcaatgtgtgtatatgtgtgtttgtgtgtgtgtgtttgtgtgtgtggtgattgtgtgtgtgtgtgtgtgtgnnnnnnnnnnnnnnnnnnnnnnnnnnnnnnnnnnnnnnnnnnnnnnnnnnnnnnnnnnnnnnnnnnnnnnnnnnnnnnnnnnnnnnnnnnnnnnnnnnnnnnnnnnnnnnnnnnnnnnnnnnnnnnnnnnnnnnnnnnnnnnnnnnnnnnnnnnnnnnnnnnnnnnnnnnnnnnnnnnnnnnnnnnnnnnnnnnnnnnnnnncacttacagagtcacttttctactagaacagttgagctgacaataagatctgatttgagaaccctgatggtgtgcacgagcacctaagtgttaagtggttaatgcggcacagagcagcatacttttcttggcacatgagaaaagtatctgagatgtgaaaaatgtaagactttcccctgcagaatggggtaatccatgtgacagaacatttccattctcttatgttgtaaaactgtcccacctgctctagtgagtatacatgtgcatgtacacacacacacacacacacacacacacacacacacacacaacctcagtaccagtgatagtttatagtgtgcagcaaatgcaaccattcctacttccttgctcccttactataagcagtcagagcattaccacagatttggcacaagtgatatgtaatgaaataacattattcttttatacgctatggacaacatttttaaattttctatataaggatctggtatataaggagggccaaaggtcagtcaacagtagccattgccacaacacacagtgcctattaactcctgtccttgcccttgacactctgagaactcagtcaacactgacgaggatattaacaagccattcatacagactctctgtgttctttgtgttattcttatggaaagtaattgacagcttgcagggtactgaatagacttgctcatttcactatgatgaaccatagagttttatgttctcatgggaccactccctagaataggggtagaggctggtacatcagagccaggtcaccttcatcaagttcataatgttcaataattttatgctctctaaactttcgtctttcttctgcttttgtatattaatttttctttccagtaattgtttgcaaacatgtcatttggtactgaaaggaaatttgaatctaatccaaaattttaaaaacattctgaacagaaaagctaaataattcatatgtaaagctgttatcaaattaagctgattccactccccataacagctcaattttttctcaaggattgaataaaataattacacatgttctcctctctgatatccatgcctcctcccctctagttatcccttggaagaatacaatggctattgcttcagatttcatgtgtgaagtgcctattagagtggggttgtggagagttatgctaaataataaggctggagactttgcatatttatgaatgtgtatatttttaagaaaatattttttctgtgttgaatagttcaagattttactgatgtgatggctattcctggttgtcaacttgtctatatctggaatgaactacaatccagaaatggaggacgcacctgtggtccagatcttgaggctgaaagacacaggcatctgacctagatcttgacatggaaaacttgaagcatagtagccatgaaaagcttgggtaggcccaggcaaactagtacatgcctttaatctcagggagcagaatatgatggtttgagtatgcatggcccaaagaggtgcactattgggggtctggccttgttggaggaaatgtgtcactgtgggcgtaggctttaacaccctcatcctagctgcctggaagtcagtcttctcctaccagccctcaggtgaagacatagaactcttagctccttctgtaccatgcctgcctggatactaccatgcccccaccttgatgataatggactgaacttctgaacctataagccagcccctatttaatattgaccttataagacttgccttggtcatggtgcctttcacaagagtaaagcaataactaagacatatctgcagacaatatataaggttagttaagaaagactcaaagaggcaatgtaacagagaaatcatcaaagaagactcatcaaatggcaggcactactttcactttctatgtgctcctagaggtggttcccaaggccataatgttggcagggtcttgaccatctttccagtctcccagtctccagactatgcttacatatagcaatgtcttgcagacagcttgctttcccctattcagctcacaagttgagaaatgagaaggtttaagagaaatgagcattagcaacaccggagagaacccaatcatggatgaacacatgcaagggtctaactcctttagtggaggccctcaagagaatggcctagaaaaaagagaagatacccatattccttttttatttttaactatttcatggttgagtgctctgctgcatagacatccacctgcctgaagagggcgtcagatacccctatagatggttgtgggccaccacgtggttgctaggaattgaactcatgacctctggaagagcagccagtgttcttaaccactgagctatctcactaccctgctacccgtattcctagtgaaaaaaaagtctcaaacacaaacatacatccaagttgctggggtagaaaggagcatagcatatatactcatagaaggctatggggggaaattggaaaccgaaaagccagatcacaaaatgatattgtttcagtataatattaaattgtaagtgccctgagttgtcagatttaacaaataaaaacagaaggcgcatagcttgccctttatgataaagaacagatatttgataatttccattatgttggaaatacagattagatatctctaatctgaagaaccccaatccagagtgttttgaatgctggcctgatataacggcagagaattctgttgcatgtacacgtgtggtggtctgaatgagcagtcactccataagtctgcggtatttgaatatttgagcccaagcagggtagctatttggggaagattaggaggactggctttcttgagggaagcgtgtcattagggaaggtttggagatttcaaaacccatgtgtctttctagggacccctctctgcttcccatttgtattttcagatgtgagccccagctgccactccagccacctgccacttgctatctgctctgctaccctgaactctgaccttctggaatcacaagccctgtaatctctttcttccataagttgccttggttatgaggctttatcacagcaatagacaagtaactaatacaatattattataataataacaatttatattatataatatactaatataatccaatgttttattattataataacaatgttattattaaatctatgaataaaataactctaggcttttgtatatgtgtgaaatgtaactaaatcttctgttttgatttgatttccatcccagagatttcactttatgcatacataaatactcccatatatgaactaatagtagccacacgcatttctgtgtgcacacatgtggatgagtgttcatgatgtgtgtgtacacatgtgtatgagtgttcatgatatgcaggtgcatatatttctgcagatccatgtgtgtattcaagtcaagaacagaagccagtcttgggtgctgtgcctcaggtgccacctacctctcactgacttggggccaagtgatcttcatgtcccgacccctgtagtgatgagattccaagcatgtcccagcacactggacttttttatgtgggttttggaggtcaaatataggttcttattcttgggcagcaagcacctcatggattagaccatcatcccagtatcctacgcatttttgaatgaaaggtaacaaacatgtattgcaggaagcataaagaaaaaaatgaaagacgaatatctgaaagtcaaattgagctgccgccttatctgtcagttgtagactaagaggcactggtgactgcggggaactggagcagaggctgctgtgatctgggggcttgctccaagatcagaaggttcttttttgagtatgctcctcctgggggaggagaagatgagctataggtcccagcgttggtggtagagtggtttccaggaaccccacttttcctttccattgctaactacaacactacaaagggctagcttttactgagttagttttagcaaagaggaattgcaagccaggccatgggaagggtctgaaaaggtacagagaactctgctactcaacatgggcactggcatctaaggtcagtaggtggatgtagggcacaaaaatggctctggggccatgcgttggcctttaccttatcctgcatggtttggtcaggtagcagcctattgttgcctttagtttgacctctgtaattggctctgactcagataaattttacaggtctttaaaaatgatttttgagaatttcatatataaatatactttatacctataacttctactgctcctcattcctctagcaacccccatctagattcattgttacttatgtatacatatgtaacacctacagagtccagttagtgtttcaggtggggttaggtctgtcttgttggtattggataatctgtgattggggttcctgcctggagaaacttgatttatcctcccttagcatccattgattgcctataactaaaaaatgcactcttgaattaggtttttagtttgtttacatgttatgggaaattacatatgagctcaagttttagaaggagcttctagtcaaattaatttaatttaacactacctgcctcttaggactcagcccttacacaattctctcctagacacctgtctttcttcccatgccaaaaggtcctgttagatattttcctcctgcacagttcctttcttcagtggatcattgatggcatgtgttaaaattgaaattgtctgtcatctgtcttccctatctaagtaggaaccctcaagggctcgaactatgtcttcccctgttggttacctcaaatctaggccaggaccacaaataaaagacaagttcagtgtgctttgtttgaatacatgaattaactgaaatatctttagagtagcctttgggcaaataagccaccacctatgctgaatcaaatttctaggatgtcaccagctaaggggtttatttattgaggatgtcttagctgtcaggttttatgaaaaattttagatatttctgaatctaggtcagtgtccttaaagacaggataaagtagttgaggatatgagataacccagaaaaagaaaccaaagaaagccactagaaatgcagtgaaaattttgagtaactgagagaaatttaaaattcattgtctggattgtatggaccagacacttaagaataacatggatatgtttagcatggaagtcttcaaaccccctggatttatgcatacatcattgtaagcaaatgttcttcttgagtgtgatgcttcatctttggtcagagggatcaaatatatcaaatgccatttttaataggcaaatcatataaatgaattgttgataaaagtaaacttttaaaacattttttagacggagtctgattgaatagtacaggaacttatattcctctcacctcaacatctggaaggctgggattgtaggcttcttcattagcattcggagacatgaatcatttaaattataaatactttatagatcagattgacccaaaatagtcagatagcagacattatccaggatatgtaaaagaggactttcacaagctgtttggtatagtaaagtattcagaacaaaatatctccattagaagataatggagaagtaaaattctctttatctttctggagaagaattttaagactcagtattaagtcctagactagtactgcccaatataaacatatatagccatggttcaaggctctcagtaactacattgtaattctagaaaaaaaaaatcctggttcactttccacaaaagtaatgagctagatagatacaggcattaatagtgtgttttgtttaatttgccttctactttattccagtgcattatcaatataaatattctcactgacatctcttacgttgttctttctttgtatcaccttccatatggggtgtgcatatgctcttagaggacagtctctggttggatgatagttctttattggaaatagctgatctatatgaaagttttgtaaaatagatacctacaaaagcagatgcatgggtcctaatgaatctcactggttttcttacaatcaaaatgtgtctataaacacctaaaggtagtctaattactgtatacaaagatcaagttttaatataaattatttaaaagtaggtcaaaattgataattaattattctatttgtactcaatgactacatatggtagcaatgactatatcaaaagatcagaatgtagaactactcatacattgagtaatagattacaaaagtgtaatgatgcaaggataaaaaatagtatcactagttctgtactaagtgacccctcagggagccccgtttttagatgtttggggagaaataaaaaatcagtagcattagtcccactgcaaacaatggcacaactggaatatcaatgaggtattgtatatttgtgttgtgattttcaaatgctttgttttgaagtttcttctaaaactgaaatcctgttggctgtcagcagctacagttaaagtcatcaagactatccttgtcaaactatcagagaacttctgcctgtgtctgagcatcacaagtccagagcctgttgaataaggaaggatccatacatggccctgtagttatggcttcatgagtttgtgattccttccatttcactttgtaatttgatctattttaaactcgatagttcctcagaatgggagtatatcagacataagttttttgaagagtaaattaaagagaactttaggatgggtgtctttcccatctgaatggtaagctcacaggtgggaccaaggttcccacagacaccacaaggttcacagggaaggctacctgcagatcctgttcattcatcctccccaggaataggaaactgattaacctcctgtgtgtgtgtgtataggtgtgtatgtctgtcttagtgtctgtctgtgtgtgtctgtgcatttgtgtttatatgtgttagtgtatgtaagagtgtgttactatatgtgtgtctatgttagtgtatatctgtatgtatatctttatgtgtatgagtctgtgtgtacattagagcatttgtctatatgtgtgtttctgtgtgttagtgtatgtatatgtgtatctatatgtatctgtgtgtattttcatattcatgtgtgcatgtggaggtcagagttgatttatttttaaaatatggtttctcactgagcctaaacttactgatggtttaaactggttagctatcaggtcaccgggatctttctgtctcttcttcccaaagactagattacaggcattcattgttatgcctggtaatgttcttatatggttagtgggagttcaaagtcaagtcctcatacatgtagagcaaatactctaccaactaagccagcttcctaaccccaagttttctttttttcttaaacccagtctataatacctaattaaggcatctttagtgagctaattggcctcattttaaaaatatagcagatacagtgagaggcactaccacattaagagccaaacactgacctgtgtatagtagcataagtctacaatcctatccattccaagagttgagccaggaggatcacaatttcaggtcagtctgtactgggaatgtagctttgtgataaagtattttcttagcattttaaacaccttaattccaattctcaatggcaagagaaaaagattataaagtcagaactccagaatcaaataagatcatccttaagtccagtttgctcattactgcttcttttagtgtgtcttacttttttgtctgtgaagtggtaaatgctaactatacctacttactaaattagtcggggatatgggaataaagaactgaatgggccatatgtgttagttatccatttgttagggtgttacatcatgttttaggtgacacagtacagcttggaactagagaagtctaatggtgtagacaaggaaattactttgggagaatgatatatggtctcccattatttagtggctcagtcttaagagtttggcttttaattcattgctggagttctaatactaaccatgacttagttgtgttttcttttaggcattagtaatatcaaagtgcccttgggacagtaaaccattatggttgtttaaataatgagtccataagctcaatatttgaatggttagtcaccagggagtataactgtttgaaaggattagaaggattaggagctgtggatttgttggaggaagtgtgcttctagagatgggctttgaagttgcaaatacacagagcaggactagtctttctgtccctgctgcctgcctgtggatcagaatgaagctcacagccacttctcaaacatcacccttgccttccgccatgctcccaaccaggatgataatggactaagcctctgaaactctcaatcaaagctcccagtcaaatgttttcttttataagagtggccttggtcatggtgtcctttcacagtaatggaacagtgacaaaataaatgggcatcaagaagcactgagaaactgaccacaattgcaagccctaacccccaactccctagtgctaggtctgaactccagcttcacacaaagcaaccctatagcaacgtagaaagactttgttaaattgagaacagaattagcctcttgaagacagtactgctgtgcactaattggctgtatttggtggaatattactgtgatgtggctacattttaacatgcaagagattgttagcaaattatcagggagaatgtgaattcctgaatgtatttaagttagctacttccacagatgaaagtgggcacttagcagacatgctgagaatctttctgtttgtatgcttagttccttggacttgtataaccttgtgacatgggagagggatggttgggcctgaagcagctgtttattctgtcaggtgagaagttacagaactagtcaccaacaccagacatagaaaggccctccacagacactgccagaaagtgtaggatgttcttatctactttttaaggaagtggctgacttaaaaacatgaaaaactcctaccaatcctatgacttaattactatttctgacttttttttttactattttttaattaaataatttatttatttacatttcaaatgttatcccctttcctggtttcccctccacaaaccccctatcccatccccccttcccctgcttctatgagggtgctccctccacccacccacctatccactcctacctcactaccctggcattcccctatactggggcatcaagccaccacaggaccaaaggcctcctctactattgatgccagataaggccatcctctgctacatatgcagctggagtcatgggttgcactatatactttttggttggtggtttagtccctaggagctcttggtaggtctggttggttgatattgttgttcttcctatgtgtttgcaaatcgcttcagctgcttcagtcttttctctaactcctccgttgacttccctgtgctcagtgcaatggttgtctgtgagcatccacatctgtatttttcaggctctggcagagcctctcaggagacaggttctgtcacactcctatcagcaagcactttttggcatctgcaatagtgtctgggtttggtgtctgcatatgggatgaatccccaggtggagcagtctctggataacccttcccttctgtctctactccacactttggctccatatttcctttagatagaagcaattctgggttaaaactttagagatgagtgtgtggctccataccccaactgtggataaaactgatttcttatgaacatcattacctttcttaaatgatttcttctctttctttgtcccctcctctccactcctgtctccctggagaagagcgtttctcttcatgcgtcctgatgtagcagagaccaggtctacgtgtctttttttatttcttcccttaaatctgtgaacaagtcctagtgtctgtgaatgtgcaaagtgatgagattacccagagatagtcatatatacttcagacaggtgctgtgtgcaccttagccatcagcttccagaggcccctttgatcccagcttgtaaactctgaggacaggctcgttgacatagatgagtgtgtagatacagctggcataactgaactgactggcatcctgttggaaacccacctgttccttgagtaccttgcatttgacagatttcagcattaagttctgtaggatgatcatggtggtccatgaagaatgtctacagagttaacaaaggaaatagaaactagcaaaggaggtacctgagaagcagcttcatcatctggtcccactgtgttcaattctgttcttaatttacataggaatctgatgcccagatcactcatatttgaagttctgtgcagaaatataatgtaaatttgtatatacatatagaaataccagcttatcgttaatgataaagaaatattaaaagggtttatttgggcctacccctttagggttgatagtaaaatatgcaagaagtccatcttaacctcactttctaggaaaaaataaaatatatatatcatgttcctttctatgtgctgagcctctcaaagtgtttctgtccagttctccatcttagattttctgagattttgtaagtcatctaaatcctattacctcttatccccacattcagttttggtctttgatgctggtggtttttcttgatgatggttgtttttcttgttgttttgttttgaagttcgatcttctgccaggtctctggttcagtctaccatcccacatactagaagcacgtatcctgggatgaggtgagaggacagagattaagagaagaagtatttttctcttcttctttttttctttttcttatagtgtcaacaaatgtgtgaatacacatctgtgatctcagtatctcagggctgaacagaggacagagaagtccagaccagcctggagtatgtggcaggactatgaaccccttaaattaaataactaatacttaaaatacagtttgccccctaccttttttactgtgtgctcttggatagttttgaattcattcaccttgctgtgcaacatttatccagaatgttgtcatcttgtaaaattaaagcttaggaactcgtttatgtcactttccttttttcctttccttctttgctttcctttcccactgtttctgtctctttctctcagttcatctctcctcacttctgatttttgccaaggctaatttaaatggctaaagcatgcagataagcctttaagtcaaagtgatatcaactaccacactcttcttgaattcatgaacagtgtcttttaagtgggaaaactgtgtgatagcccaggactagctgccctggaactagtaatgtccaaggggcttcatgtgattccctgctattaccatctccaagtgcctcacactgcctatattgcctccacatgcacgtgaactcaagtgacagacaggatacacatacatgtaaataactgagaaaccaataagaaagctagtggtattcacactagatgtatggtgtcaatttgggtcttatttgcaccagtaatttagtcgtaagcataatccagtaaatcctttctgctaaaagcttcgcctttctatcagatagataagctcttgtggacctcaccagatgttgttttggccttgctcctgcccctctccctccatcaccagctcttactgagacattggcagggagagatggctacagtgaagtgtaagagggctgcacgtgaatgcaggaccgtagaggagcttcatccctggtcctcagagccacaatggattaatgcagtttcaggggcttctgcaggctttctgaacattctgtttcacttcaaggtttaaagacactgtcctaaaactctctttgctacgactgggtaaaagttaatcaaagactgaaaccttgacgtctaattcatgaagacaactcatctgtcaacacagacttgtcctgctataattaaagctctgtcagagcttttcttattatctggcaaacccatattttcttaatttttagggttttacttggctataagtttcctctgtgctataaagcagcacctgtaatatgttcaggaatgaacattttagcagaaatcaaagagaaaaatcaatatgactggtttttgacttataacagttaaaagagaaaaattgaaagcattggattttggatatgtgtctctgcttcacagtttgaggttgagtggatgttaaatatcacatgctatgttgcctgtcatctggattattctattttattattttgaagctctaaaatcatctgactaattaaataggtttatgccttgtctcttccacaccatggttcctcaacaccacaaatatgaatcttgctgtcattacatcacatgatattagaaaagaacaaaagccacaagcttttaattagtgcctagtttattgtgaagggactaatattagtcatatattttagcataaaaataaagatttcatggatataccacaagtgtgtatataagtgtacatgaacatgtgtgtatatgtgtttgtatatgtgcatgtatgtatgcacatgtgtgtatatgtgtgtatgtatgtgcattcgtgtatgatgtatgcatgtttgcatgtgtatgtgtacatgtgtgtctccctatatatactcatacacacaacaggcagttgccagaaattctgagggtcaaagagactccaaaattagggatttgttttctccatagcctggctcagccttaaccttcagtgcacaggagctgattactttagcaaggtagatggtcttccctacccactgttctctcatctgtaaaatggaactcaaagtgtagctgatttatatctacatagccactgcaatgccaaaacaggggtgttggaaagagtaactcacgaacaacaaaaacgttcatcatcatttaataacacaaaattgtgttaaaaaattgttgtgggtgtggtgtcataaaaagtgggtagactggccatatctttgctaactcaacactgaacccattgttctaaacaggcaggtgacttgcccacagccctcccctgagcatcattaagttgtcctttctgcagctctgctctgtaaacatccaagtgtcagagcaaaggagaacagaaccggtgctgaggtggttcatgtttggaatattggttctctaatcagtccacattccctaagacatgacagctggtgtgaagacaaggcatgttagagagcagagaatctctgatttccctctcttttggtcaagtgtgtctagcatagaacctggcacaggttaggttttgttgtttgaatgagaatagcctccataaactcatagatttgaatgcttggtcaccagttgatggaattatttgcttagtcaatgtaagtttatttgtaatggaatttttggggactcacctctcctccaaaggagtagcgtctgatatagttatggtaccttttccctaaatataatgaatccaaaagagttccaagaggcctgagagagacatcagaccatgttagttacagttggtaatgttcatatatatggtaaaagtaagtttcctcagaggatctgtggaaagatgcttgtagtattgttgtcagcatctttaaaatgtgctccatcaccaaagatgcacatagtactgttctgaaatagaaatagggactcagaagagtaaaaaatgagactttttctagagaaaaatgattttgaatagaatttttttttaattgcataacactccaaccttttctggtgaaatttgtcctcaagtgagtatattagggcagcgttaaagggaccatttttaatactaattgctaaaaccatgaactaaatgggggaaatggacagaaagaagtcaacttgaggtccttctgtgttttctaagtattttttatttggtaccttctgcctgtgacagtttggttgatgtcacttctctttgctctgatctttgggagctgataggaatgaagtttctatgactggcagacctgctctctgagggagttctgagccagtgttctttgcctctttccttggcctaagtgtaaataggtctgtggttaattaactggacactctgctgagaagcgcttgagtctgcagagctggctgtgttgtctagtgcttggtttactgggctctggtgttttcccaaaatacgctgtagcagagagaaacctttggctgaaaaggagacaaaggaagaagcagcatgcttcttgagctgcttctcttctcagagctccttttcaaggtaccagtaacccctgagcaccaattggaggcccctatgtaggccgagctcttgagtaaggtgggtctcatgttttcttttgggtctgaggatcagacccaggttaaaaggtaagggctgaaggtttggctttaacaatggtgtgtaaaaagcttttctgtgttgatacttctggtttaagactaaattttgaatgcatcagtgctttagctatttagaaaacacttcagagctacagtttgaatacaaatctaacaacagtggtttctcacttttgtaaactttcatttggagcttttcagacaaccatgtcttaatattggagttcctaatacagattttgcttccagatgccttccacccacagttgcattcagagctcctcagaatcaactaaaaggaaatccaattgccctagtatctatcaaaatggcaatagccagttcactcccctaggccttatttcttctccaacatgaaagcatatttccattgtccatgccaacatgaaagcatgctagagttgttccaccaccttccagatcacccctctcccacctattcctttaggtcttatctgacccagaatctctccctcagccttatctcccttaatcccaaatctttgtgacatagactcagccaacccagttctgagttcggaagtgtactgaaccagttgaacagattttgagcgcacaagagccaggaaccagacctaggataaaatgattggtaagagatgtttgtgagaaagcagggagatttacaggcaatgaagtttagctattagtccacctacattaaagcatactatgaagaaagccaagcaagaaagatatgagcttttattaagaaatcataatattagggcatatttgtaattgcagttttatatatatatagtcatcttatggacactgatacttgataatgacaataatgacgcatttttttattgttttcatcatggtccatttgatcactggtatattttgaaacaacgtatttggttctccataaatatttactaagcaagttaaaaagctaataacatgactcttcgatacaaatttgtgagtgttcataatcttttctaccccatagatggagacagttgactctgaaaagtgatatgctttatcaaagttatgaccacagaactgacagagctaatgcttccagcccagcctatctgattttaagatctcccatgggacagtgcagcctgaaacatttccaccatccttctcccattgtaaaaggctgaactgtgcaaacatgagctggggctatcgtttgtttgtgctgtgttgcagcaggtttcagtacaggtttcaaaaataagacaaacttgaagtgagttggtgataaatggctacttagcttcctgaccctaattagcccctatttgggttgagagagtagatgatacctactactctagtaactcacctatgaactctgtctgtctgtctgtctctctatatacatctgtctctcttgctttctctttttctcttttctctctttctctttctttctgtgtgtgtgtgtgtgtgtgtgtgtgtgtgtgaaaagccttagtgtgagcataatcttgtatcaaagctcagatctgagaatcagatcgaagccagtgggatgaacacagacaagtttgcagggctctgtcagcttggcctacttacttggaagcaacatttctcagaacagatttaacactccctgacttagatgaatgttcttaatttcatagttaagggaacaaggtcatgtgcagctaagtgtagtcctcaaggtcatagaattattagtgacccaagaaggctgaagagtcagattccgggacattttatatcacgtcaataaagagctacggaagaatcagaagagcaacattaagccatgttcaaggtgacatattattaggtgtcaggcactgtgctgacaactttgcacttactacctctgaattcttcgaaactcaactcagagtgaaggggtgggggtggagggagctaccgttgttactccatttatggatgctaatacccaggcacaagtgatacaatgtttaccaaaagtaatacatctaggaggccatgctcctacatactgtcccacttgtacatccaagctccccacctcgaactctcattcaaaggcaggaatcactctcacttaatgaaataattcacaggatgttttgctgtattctcgcaagtccagtatttgtggtgagcttcaaaatggtgggtttttttcatatctaagtgaatatctgttttgaatatgtatgtttgtgggattgagttgtggctcactgagtggaaactggtgccccctcttctggatattttgagatgtttatatatcacttgttcagggcagttttctcaaagataaagtgggcaagtggactgagcacatcatcaagcccctgcccacatttggatgccttgggaggtaacacaagttactctgtatcattccacagttccttcaggttctaccctaagcttccttctctttgcactgctgctagaaaatgtatttggttggaagcattttccagagagctgttgggcacataggcggtatcttaggagatatttttttcttcaatgtcctgcatagtgttaggcttgcggtagatagctagtaaatattgaagcctggatagtgccctttctctgtaaataatactgcttttgcatatgggaatttactaaagtgtgtcaccctaacatgcctatcctacatgttccttttatagtgtgctatttgatactctttcattaagaggtgaagcatagatagtttttgcttgattttccttggttttctataaatggaatatggcaaaagtaaagttatcagagttttaaagtctctatccttaaggaaatttgactttgcttggtttattttctatatctgtcctctgtctctttctgtctctctgtctctgtctctgtctctgtctctctctctctctctctctctctctctctctgtgtgtgtgtgtgtgtgtgtgtgtgtgtgcttatacacatttttttcttttcaaaattgctggccctcaaccatcacaataggtgatacatgatggcagttacttaggtcactggactttggggtcatttgctacagggcatttgataatgggtacataagcacaaagcataatacatgtctcatattttatatataattatgatcatttgggggtaggatagttattttgtgccccactagctcttactattagattttttttcatattgttttcttcttctaaatgaacacattctgatataaattctttatcagcagcaagtaactttttctgcttgaaagtgtttccctttcatttgcaaccacaattcctccctaaagaatatttgagcagcattcaaggtgtttaatgctttgcaccttggtgaaggcacaactcagaaaaacaacagttgaactcatgagtgtttcatgattgttgagacagcataaaaattgaagagaaaggtgctagcaactgtctatagtcacagaaaaatattgtcgatgagtgcttattctgacaaatttctagagaatgtttatgttttaggtaggtattattagactcttagaaaaataaataatactatccataatatagtaggcttggcacgtgccatgtgaattatagcagtgttttaaatttgtaaatagtcacattttattcccactcgattctgttgaatcaggtaagatagatttgattcagatcaataaccatggcacataaaataataaaccctttcaaaaatgtaagaatataaattatatgaatttgtggcagtacctgagaaaccgaacataaaatgttaaaatattagagcttgaaaatcttaaattctatcacttattaaaatagaaaataggtgagaagtcatcactctgaaatttaatatgattgcaaggtgttggattgttctttcttgtgttagaacagctgtgaggactcagtttaagatttcatagtaaacgagctcagtgagtagggtggtgctcgccattgtttatcagctctgcgttcggcttggttgataacataggagaaggaaaatataccgtgtgtatgtatgtgctgtgtgtgtgtgtgtgtgtgtgtgtgtgtgtgtgtgtgtgtgtgtgtgtgtgtgtgttcaccttgactcagaaaacgttttaactcaaatattacctaaattgtaagaatatgttataaaataaagaacaattggatgaactaagtggaactataggacaataagaagaatgtgaaagggagagtcaagtgaatgctttgaggtgtgttatgttaatgtatgtgtgtttattaattcctgaatgacagacaatgcaggaaatttgcaatttccatgacttctccaaaactgtccaaaatttagcatgtcctcctttcccttcttgtgctgaacccaaagctccttgttctataagcagcttcttctaaaactaatccaagacaaggataaaatggaaaaggcctagtgttgtctcccagtgtggtgattgcattaagcagctttagagtcttaaaactgttggcacttacattctaccaaagaacagtctggtcttaagtcataagctgatgtgtctttgcctgggggaagatgagaggcttgctgacttgtattccatttagaagtcctctgcccactgtgtgtattgcaaatacagccccataaagcaaataaatgccctttgaacaggcagaaattgaaaagaaatgaaaacatttgttgttttaaggtagtgggattatggctcatttttatttcctctttatgatcactttaatgttgttttaagcatctttatgatataaataagagaaaaagtaaaaatggtttattacttatcaaggattacaggtcttcagggtctatgaagtcttcagagatgaaactctcattattcagacagccttgtccaatcactcaggcaatattaatctgctaacggattgtgggaagcacagactcccattggggacactgttctcatagtgacataatggcctgaagaggaaaatctatacatcagccacatggaccatttcatcccagcaaaggtcttttaggaagaggtagaacctgcctcatatagattggacagaatcatcatatttggtacacatggagatgagtcatttatggtgttgtccaaatgcattagttctctctgcttcaagagaattgcagctctacctgactagaagtggcaatactgacccagtgatctaagctcctagcttctatacaaggtcatgaagagtttctttcccccaagcctgactctcaacagtgttgaaactgatgattgcaccttcaagctgaatgcctatgtaacaggggtgggaagggtagatctattggcttccccatggacaaacagcaagcaaaagataacctttttattgtaagtgactgagatagagagattgcatattattatgatcttgcttagcttcatatagagatataaagggaaaggatgtttagagagaatagtattaactgagatagataaggaaatatatagaaaagatactaattttttctgagtatgacagtgggaatggcaagaagcagtgtgttatattttgagtcacaaatgtcccctgaggacaacagagaaatagcaggaactatgggaggtgggccaaggcataggaaatggatctattttacctacaacttctttctgtgtacctccagtctctgaagcatacgagttatccatctagcatgatatttcactatgatgctccagtcttgcctcaagtcttccatggtgagaacagattttttttccctcctttcacttttcattggtattttgtcatagtatgaaaacagattgttgccgacccgtggtggtacaggcctttaatcccagcacttgggaggcagaggcaggcggatttctgagttcgaggccagcctggtctacagagtgagttctaggacagccagggctgtacagagaaaccctgtctcaaaaagacaaaaaaaaaaaaaaaaaaaaaaaacaaaaacaaaaacaaaaaaacaaaaaacaacgaaataaaccagactgttatcacgtggttggaatgaaaggatttatgatggcgagctcaaaccaaggttaacagtaaaccatcatttgaggtaggatgggttttgccttaggttccttccgttatttcataactcaccccatactgaaagtgcacccaattacatgtagataaagaatttctcaataaaaccttgacaggtttcttaaaagaaaactgacaacagtatcaaatactttatctatacaatagccccaaataatacctttttccaccagggccaaccattctgtggattcctcacccctgggcctcagtagcctgcctaagacctgatagagtactgatgttgtactgtgctcagtgcaattttattggcctgaggggaattttcctgacatgagcaggtggctagctcttgtgtgtcaggcttgtatattcattgttgtgggttatctttttccctccagagtatgatgaaaatgaatttaggtttatacaatgtttgaagaagcaccagggatgaaatacattctgtgtgaatgagatggtaataataataaaatgagaacggaatcagagatgggtgaaagaaatttagtttgatttgcatcaaacaggctcaatagcgtgaatggttggtaaagttaaatctaatttcagaagttcttgaacattctcatttctaaccagggctttaatatcattttaatgcagttttttacatatgaattaatataataaatgtcaatgttgaatagaataaggtcacattttactactttgaccagaagtgtaatcttccaagattcaattttattactattataacagtcatactggataaggtcaccaatatttctttccaagtgatataatatatgacgacagcctttatacccactttactttttgtaatttgtatttatattctgaaacatgttgacaaagatataccatagacatttcttggtcaaatggcagcctggggaagatgtatccctatgatttgtgggaaatttgaaactgtataaatggagtcattgaaatgcaacattttcttgatcgtatcatccccttgcctacagataattaaattcttgtgacgtttactccttcgacctgaaagggaaagaaaatgtgtaatgattttctgatgagtgaaataaagaaagacattctattggctgagtgttggccagccaggagtccgacttgcatagttcattgagggacattcactcaataaagttcaaagttcaggaatatcaaagacagtaaaggataaccaccaaatccatttgttttgaccttcttctccagaatcttcactaaatagtcagtccctgccagcaagacacgaatggggacaggcagagcctacttctagcatgagcagaagcataaatgagatgtaactgggacaagcataggagtattctgcaccttgtaagtgctctgtaaacaaacatttttcctactgttcttctggatattctgttggctgtggcactgggaaaggagatgctctcattctcccagaactcactctgttacaaaccttatccttatattgagtccaaaactacctcttttactcagagatcataactgtggctcctgtgatcaatagggacactactgatggtaacagtttctacttaaagcttatagagggtttactatgtatacaagaacatttagaattcatttatacacatctcagctgtagtcaaagtaaaaaaaaaataaaaaatagtatgaacaaagtttgtttaatcatactataatcagttgctatctagatttttttttcacagtgatttatttattcacttctggttttgctaaattatatttcatcagcttacaaaaagacttggaccggaactctatacttatcaatatatgtccttaaaaacaggagagatttgaagtttccaatacagtagatgatatgtaggtatggtctacttgaatctcctagaaatgaactgagaaaccctgaataacaggtatcagaaaaggtgggtgatggccccaaaatgtctcatctaatagcaatttggaataggaatctggaggaattggaaagatctgaggtgttacccacttttgtgagagtaactggtgggagccaggtttaagacacagcctcagaaaattagggctatatttttggtaacatatattttaaagaggaaggagaaaagaaagggagataaaggttattagcagtatcaaaaggagaaggaaagcaaagaagaaaaagaggggaggtcaggaggcagatgtttcaaggaaacatcaagacttggcaataaggaaaattaaacactttaaaaatatatatatgtaatatacattacatatatataatatatatatgtgtgtgtatatataatatatatgtgtgtatatacatatacatatacatatacatatacatatacatatacatatacatatacatatacatatacatagagaaagagagagagagagagaaataggttggttcttctgcagccctaaatactatgtgtttgaagatgactttggactatgtctcctcctacctttgcctgccaggttctgggattttagacatgtggcattaatcttgctttggtgataggcttgtagatgaaccctgagtttcacaaatactaagcaagctgtctaccaattgttctatatacctcaagtcatcattttcaaaagtcctctgctgattgcagtattttgactttaagagtactccttcctgggaaactcatggggaatattaggggactatacacttaaagctggtaggcagaagacttctaaacttttgtgaagagacttggcatcagacctcacagtactcttgtagggggatacatggtcagagacagaatcttcatgtgtgcttaaacaggtccaggtagaatacccaaagtagaaaaaagtagcccaggaccatccagatatagactcaagaacagcccagatgactttccgaaagaagacaggcagcctgattttttgggctaccatgtctcagcttcctgggagctgcagcagactcttaggttatgtaactgcattatttaaactattcttatgctactttggtcaaaactaaaagtatatgtgaaacaaaaacaaacaaaacaaaaaacaaataaacagaaaaggtgggactagcagaggcaggaggaaggggaagataggaggaatgtggtcaatgtgcaatctgtgtgtgaaatgtccatgtatagcacagtgctgtgggcatgtgaagtggttacacacttgcacatattacttgataattattctagtgttagatccagtgctatgccatgaattttataatgtactcctacagggtgttctgcagtatatacccgtttctcttggtaatttataacattttaactctgcctttgtgtttgccatgaggtaatttatctataagttagactttctaacagagtagaagttgcctgcaagtagctgctcaaatagaaattagttaaaaccaagtaaaatggacacttccacaggtcatttgctgtaatcccatgtcatgaagctagtggctgctacttgggcagtgtaagtgtagaatatttctcttttttgcagaagttgtaatagacccctatggtctgtgaagagacaccatgaccaaggcaattcttataatggaaaacagctggcttacagtttcagaagtttagtccagtatcatcatggtgggaagcatggcaacatataggcagatatggtgctggaggagctgagagttctacatcttgatctgcaggcaccaaagaggggactgtcttccacatagggtagatcttgagcataggagtcctcaaatccttcccccacaatgacagagttcatctaacaaggccacacctactccaacaaaggccacacctcctaatagtgccactcctatagccaagtattcaaacacatgagtctattgtgcaatgcctattcaacctactgcatttcactctggatcccataagcttgtagctacaccataatcctaaatgcattaagttcaacttcaaaagtccccatagtctataaaagtcctaaacttaataaaaattccaacgatcaaagtctcatttgagacttatgtaatctctaaactgtaattttctgcaaaatcaaaataaagaagtatatcatatatccaatctataattgtataggatacacattagtcttaaatggaagaaagggagcatgccgaggagttcctggaccaaagaaagactgaaaaccatccaggcaaactccaaactcttcacctctaatatctggtgtcacggtacttttcagatctccaactccttccagctttgttgactagagcatgtttctttctcttggacttgggccacttcctgttagcagctttccttggcaggaattccatagctttggcctctctaaacccttggcggtctccaaagaaagctaggcttcaccttcacatctccacacaatggcttctctgggcctccatgcagggaaagccctgacacatgcctggctacaacagtttattctagtctcagagggtgattctgtaacccctttcctctatccttgattctaaagccagaaccatgtgccttaagctacaagctctgctgcttgctggggctagaagatggcccttgttgtgttatgttttcacagctttttgttttcaatggtttccttcactgccaaagtttggctgtcctagaatctcctctgtagactgaccttgaactcagagagctgcatgcctctgtctcctgaatgctgggattaaacgtatgtaccaccatgccagaacctaagcttttctttaatttgttttcacaaaatggaaacttagcagggtgagatcttggtcaaagaccacctcccccttaattctatttaatatctttaatacgtttacatccttgaacacagcatttagctgcatttatgtcctattgcccctttaatgcttgaattatacattttgtcttttttctttctaagtttgatggttcatcaaaatgctcttcataagggtgaaccataggatagaacagtttatactagtctattttgagacttcctttactaatgtaattaatctaaattttttcatcttagcctcaggcatactctttggacaatagcaaaaagaagccacatcctcattaaaatatcacaagaaagatctatagagagcatactaaaatcctcttcaaaaacctctttagccaggaccacagagttcaaatcaccctcagtatcttatttctagtaatatggaagacaccatacatgtcttctatattccaaactcaaatagcctattaagcttggattaaagcataccactgcttttctaacccaaagtccccaaatccatattcttcccaacaaaaacatggttaggcctaccacagtaatatcgtagtctctagcacaaatttctgtgttagttagggctttattactgtaataggcatcgtggcaaaggcaactcctgtaaaggaaaacatttcattggggctggcttatagtatcagagacttggtccattattataatggtaggaagtatggcagcatacaagcagacatgatgctgaagaaatatctgcgagttcttcatctagacctgtaagcagcaaggaggagactgtctctcacactgacagacctagagcatagacgaccccagaacctgcacccacagagatacagttcctccaacaagaccacacctacttcagcaaggctatacctcctaacagtgccatccccgtgactgagcattcaaacacaggaacctctggggccatacctattcaaaccaccacaggcaatttggttttttgatactaacatttgtatagggaagcacaacctcttagctgtgattgagatatttgatttaagtgctgacagcctgaacttttgctgtgtaacaacttatgaaattttgtctcaggcagtagtccttcatatttcataagcagatcttttatgagttgatgcttctttcatgccttgtttttaaccgtgtctggtgctatatacccatgattcaagcactcaggaggctgaggcaagatgattgtgagtttgatgctagccttgtctatgaaatatcaaactctgtctcaaaagctatgcttttatattaagacagttaagtgtgataccaaatatttaccaaatgtgtgtagtttttataaagcaaagtcatgacatagtaaaagattgtacttctttattatatattaaaccaggaatggtagcatgaataatgataactgtatttttatattaatgaaaatagataattattgaataaattgcatttcaagatagctggaatcattaccacttcaaatatattttcggatacttgctaactgctgtagtttgtcatactattgcatttgtgattcaggaacatgaaatattttaattaatagttaactataaataaatactcagttgttttcattcctgtgtccagattccctttcttccactaaccatcctcttagtatcttcaggctaaccacccttgacttgtgctagaaagatggctcagggtgctaagccacttcctaccaactctgatgacctaagcccggttcccagggcccacttggtaggaggagataactgacttcggcaaattggcatctgatgtatgttcacattcgttccatggtcgcagataattaaataattttttaaaggaaaaaaaaacccattcaataataattttgtatgaatccatcatttgattaatggttataaatagtgtttatgttaataaatctcttattccttttccttgtagagctagaatattttcaagaattttccaccatgtgtgctatatcacagtgtgagttgttcacactgaacaaggagtcctaattggtcctctaagaactcatttgcctaacatcaaataggtaaaaggcaagagaactggaatttgaacacagatctgtgtcactcctcagtctatgtactagattcacattctcttctaacatttattagttgatgagccttcactgccccattttcccaggacagtagcctttccagtgttaccccagaaagtctggccctcggtcctcactacttcctcagggaaagtggtggctttggtgaatatattataggctgtccctggtgcctccccaaattgaccgaagactacagagcagccttgccaacaagatcagagtgagaattcccctctgtcacagtctgagataaaatgtgttttgtggaaacaacagctctgtgttgactcatcttgagcttattctcagcaataatcccaagctgttttcacacatgctgctgtgaagcaaaactcctccatcttgttgagcacatggtgagctggacctgggagctcacccacaggaagaattctcatctgcaggtctagagcaggaagaggaaggcagcccagggatgtgtgaatgtggatgtgaaacactgttttggagtacagtgcttacttctttccaaacttgcactgattaaaatatgataggacttttcttaattgagcaggaattcaatttagcaattcaaatagcaattcactgaagcagacatctgcttaaggaatccacatgtttgtccagccatctaccacccactcattggcactggctgagtagtctccctctggtgatctacaagaggacatttgatgaagaaggaagcttagtgcttagcaaccacatttgatgatgtagtcaaggaacaggagacttggtagcctggggaagagtcttatgttgactttatctttgctaaatagtgtgttgggagaattgaatgcagatggaaacagtgatattcttccattatagagatttgtgtctcttacagtcatttatatataatcctgtctgttaccgaaaggtactttggcagggtgtgatacaagttctcaatggcttttaagtgtatggcgatattgccatgcatttgcttgtataaggtgacacttttaccttatccaaagtataagaagtcttccccttgcttgccagggcgtggctgtaaagactgaccattcaaaaggaaatcatatacagtaaagctaatctatggtggatatatgactttttcatgaatctcaaataagtctcataaacattcaaaacaatcttgccatagtttatatgagaatttagatctgggaatattgtaaagctaatacataggtagcacactctgcgtttaaactatagatacattgaaaaataatgggcattgtatttgttgaagcacttcccaagagcaacttgaatggtgcttcctggctttcattttctcaatcaatgatggagtctgagaagatagcatggatccccttccagtatttcagcctttgtgaggtcactatgaaacatgagaattttcaagaatgattctttttgctggccccttttcttctggcacatcttccaactttctgtggtagctgctcccctcctgtctgacagtgtttgaatttgccaagctcccctggctgctaacacaacaacaaagtctggggttctgtagtttttgggtttttttccctataactttagttatgtttagaggcagtgtccacatttcaggttgccacatttagtttctctgctgtgcctttgtgtagtttatgcccaggtctctcttttggttactttagtgagatgttctgagaatttatcagtaggatgccacaggacaacatatattttgctgaccacctcattggctatgcgtaactgaattccagatacctagtgaataatcactagcaatttgaaaggaagcaatgttagtaggtactgctgattctgtgcctgttttatacactatgatttgtggactgaaaatgacctagtggcagagtttgtactttatgcagtgactcagagttactctttcatagcaactgaaactgaaccatgctcttgggaccaggatactatttaactcaactgtggtagttgaaattaggcatgctgagcttgtgggaagtaagggctccctgaatctgtagaacttggttccaagaaaattgcaaatatcaaataagcttccagtttacctgagaacaaacaaatagctaagcaactgcttcctgcctcagtagtcacactgagttatcaggactcagcagcatgagttatggaacctctccagcatggcagaaagtcctttagtcagcactgccccataggaagtaatggaagttgttcaaattattatagatctatgattatcaataccattcaaggtccaaaatattatttctcccaacatgaatgatttggctttgggtttgtttcttcacgcactaaagagaatccagtaagattctgaatacactaagtatgctgacatatatttcttttgcacatagggcttttataattactacagattatgtttttaaaacatgtatgtttcatgaggtcccatttatcaattgttgatcttagagcatgagccattgaagtagtgtttaggaaatttcctgctgtgccaatgagatcaaggttctttcccactttctcttctattagattcactgtatctggttttatgttgaggtccttgattcacttggacttgggctttgtacaaggtgacaaatatgggtctattttcattcttctacatacagacagccagttaaaccagcaccatttcttgaagatgctttcttttgttccattgtatatatttttggcctctttgtcaaagatcaagtgaccataagtgtgtgatattatttctgggtctttaattctatcccattgattgatttgtctgtctttgtggcaataccatgcagtttgtttgtttgttttttatcactattgctctgtagtgaagcttgaggtcaggaatgatgattcctccagctgttcttttattgttaagaattgttttcagtattctgggtttttggtgtctccagatgaatttgagaatttttctttccatgtctttgaagaactgtgttgggattttggtggggattgcattgaatctatagattacctttggtaggatggccatttttactgtgttaattctgccaatccatgagcatgggcggtctcaccattttctggtattttctttgatttctttcttgagagacttgaagctattgtcatacaggtctttcacttgtttggttagagttaccccaagatatttttactttttgtggctattataaagggagttgtttccctaatttctttctcagcctgtttatcctttgtataaaggaaggctaatgacttatttgagttgattttatatccggccactttgctgaagttgtttatcagctggagaagttctctggtagaactttttgggttgcttatatatactaccatatcatctgaaaatagtgatacctttatttcttctttaccaatttgtatcccttttatctctttttgttatcttattgttctagttaatacttagaatgctatattgaatagatacagggagagtggacacccttgtcttttccctgatttcagtgggattgcttcaagtatgtctccatttaatttgatattggttgttggtttacagtaaattgcttctattatgtttaggtatgggccttgaattcctgatctctctaatccttttaacatgaaggtgtgctgtattttgtcaaatgctttttctacatataaagcagatgatcatgtgacttttttctttgaatttgtttatatagtggattacattaaaggattttcatatattagaacaaccttgtattcctgagatgaagcctacttgatcgtggtgaatgatggtttgatgtgttcttggattcaatttgcaaggatgttattgagtattttagtatcactattcataagcaagattggtctgaagttctcttttttggttgggtccttgtgtggtttaggtattagagtaattgtggcttcatagaaccagttaggtagtattccttctgattatatgttatggaatagttttaggacaattggtatcaggtcctctttgaaggtctggtagaattctgcacaaaatccatctggctctgggcctttttttggttgggaggtttttaatgacttcttctgtttccttgtgtgatatgggcctgtttagatagtttacctgctcttaattgaacttttgtatgtggcaaaggacatactcaataagacaaattgtcaacctacagattgggaaaaaaatcttaactaaccccacaaccaatgcagagctaatctgcaaaatacataaagaactcaagaagttaataatcaaaaaagccaaacaacccaatcaaaaaatgggggataaaactaaaccgagaattcacaactatggaatctggaatgaatgagaagcacctaaagaaatgttcaaagtccttagtgatcagagaaatgcaaatcaaaatgaccctgacaacccaccttataccaatcagaatgggtaaaatcaaaacctcaagtaaaaacacatgttggaaaggatgtagagaaagaggaacactcctccattgctggtgagattgcaaactggtacaaccactctggatattaatttggaggttcctcagaaaattggaaatagatctacctgaagacccagctatatcactcttgggaatatacccgaaaaatgccccaccatgccacagaggtacatgttctactatgttcatagcagcttttttgtgatagcccaaagctggaaacaacctatatgtccgacaatacagaaaatgtggttcatttacacaatggaatactactcagctatgaagaacaaggacatcctgagttttgcaggcagatggatggaactagaaattatcatcctgagtgaagttactcagaccaaaaaggatgtgcatggtatacactcaataataactggtttttagccacaaaaagaaaagaaaagaagagaaaagaaaagaagaaagaaaaagaaagtactagaatacccaagatacagtccacagaattcaaaaaggtcaacaagatgaagtgcccaagtggagatgcctcagtcccactggggacagagaagaaagcaaacacaagaggggagggagggagagacataggagggaaagtggagaggggaacctgatctggcattgagttagggaaaagtactgaagccctgagggctagcagaaagaattgaaacaggcaacctcaggagataggaagttggtaggaccctccagaatgcactagagacctgggaggtgagggactctcaggactcaaagggagggaccttaaatggaattccagacagtagggagagggaacttataaaacctacctccagtagggagacaggacataaggtgagggatggggttgccatcccacagtcacatctctgacccataattgttcctgtctgaaagaattacaggatggaaatggagagaagcctcataaaaagaaggcccaaagtgggatccaggtccagaagaggtcccaaggcctgacattattaccgaggctatggagagctcacaaaaagggacctataatgactgccctcagaaagacctaacaagcaactgaaagagtcagattcaaatatttgtacccaagcaatgaacagatgcagctaacccctgttgttgatattggaaaggctggaagaagctgaggagaagggtaatcctgtaggaggaccagcagtctcaattaatctggacccctgagatctctcaaacattggaccaccaaacagacagcatacaccagctgatatgaggcccccaacacacatacagtagaggacttccgggtctgtgttcattcagagatgatgcacctaaccttcaagagactggaggcccgagggagtttacaggtcaggtggggtggggtgtgggtgcatccacatggagaccttgggatggggaggaggtgtgggatgtggagcagtcacagcatgtatggggtggtgggaaacagaatattgagtgtaaaaaataaattaaaaattaaattaaaaaagtttcttggacaagtattttgaattattaaaagtccagatacgactcctgggtacatacccaaaaggtgctccaacatataacaaggatatatactctactattttcatagcagccttaggtataatagccagccagaagatggaaacactccagatttccctcaacagaagaatggatacagagaatgtggtacattttttactacagagtactattcagttattaaaaacgatgatttcatgaaattcccaggcaaatgtgtggaacttgaaaatatcatcctgagtgaggtttcccagtcacaaaagaactcacatgatatgcactcactgataagtggatattagctcagaagttcggaatacccacaatacaagtcacagaccatatgagacccaagatgaaagaagatcacagcaaagtgtggatgctatggtcctactcagtagtgggaaaagaataatctctgggaagtagagcaagagagggatctgtcagggagagaggaggcggagggaaaagggggcgagttcaggtatgggaggatatgggagagaagtacagagggtggggaattagaaagtaggtgtgtagtagtggacaaaggaactttccagatgccagggacccaagagtttccaaggcccaacagggaggactttagccaaaatacccaatgagggggacatagaacctgtagagaccatatccagtggataagcacagccctcagttgagggatggggctccccacctacctcaaaagtattaatccagaattcctcctgtcaaaaaaaaaaaaaaatacggggacaaagagtgaagcagaaactgaaagaaagcccatcctgagacttcctcacctagagatgcattccatctgctgacaccaaacccagacactattgctgataccaagaagtgcttactgacagcacctcagtttagctgttccctgagaggctctgccagagctgaatcaatacagatgtggatgtacacggccaaacattggattgagcatggggaccccaatggggagtgatggcaagggtgtaggagctgaaggggtttgcaacctcataggaagcacaacaatatcaaccaaccagacccacctaagctctcaggtactaaatatccatccaaagagtacacaggatatgtaccagaggatggccttatctggcatccctggaatgggagccccttggtgctatggaggcttgatgacccaggatagggaaacactaggctgctgaggcaggagtgggtaggcaggtgagggaacaccctcatagaggcagcaggactgaggaggggatatattcaggtgaaactgggataccatttgaaatgtaaataaataaaatagccaatacaaaaatgaaaaaaaaaagtggggcagtggtgatggcacacacctttaatcccagcattgggaggcagatttctgagttcaaggtcagcctagtctacagagtgagttccaggatagccagagctacccagagaaaccctctctccaaaaaaataaataagtaaaagaagtccagatacatagtaagatgctgccttggctgctggcacttgagtaataccctaggactgtagttctatatgtcaaatgcaaaaatgatacccatcactaccaggtcagagtcccaactgctagtctgaaggctcaatgactttctttcctcctttttttctttcctcatcatgctgtaccatggtatgactgacctggaagtctggtgtctggattacccatcatgggcagcatttattttttaccacaatgcctagagtacgtttagtgctaaatagctttttgtttcttttgctagctccatccaatgtgcagtagttgtttagagcactgtgataaaggggtttctcaggccttgccagggaaacatatattagttttgactgccatgaaggaggcaagaaaattaatgtgtttgctggcattgttgctccctccattgggctgcaaaccccttcagctccttcagttcccttctccaactccatcagggacccacaagctcagtctaatggttggctgagagcttccacctctgtatatcaggctctagcagagcttctcaggagacagccatatcaggcttccatcagcaagcacttcccgaacccattgggctgaccacatatgtggcagaggatggccttgttagacatcggagtaaagtcggagtaaagacccttgggcctgagggtgttcgatgccatggtgggaggacaggagagggtgagtcggggagcaccgtcatagaggcaggggagggaggatgggatagggggtttccaaaggggtaacctggaaaggggaaagtatttgaaatgtaagtaaagaaaatatccaataaaaaatagaatattagtgtgcataccaagaatctgacattattcaatgataaagcaataaaaatattttctcaaggactcccttttcctctttcttaatgatatagaagtcatttctgggtcttataatgtctctgagtaaccattaagaaaatctattattattgttattgtactaagtatagacaacaatatctgtggtttggatgattctgtttaggagaatgttggaagggaagatgaactgtcactcaaatgtgtctatccatcaaacataaagacaaaaatgggacacacaaaatatgaaaatgttataaaaatgctctcagaagttaagacttggagaatgttgggattgaagaaatatcatataccttacagctgaaagttttaagactcatcactgatgaaagaagtttaataaccacagcaagtatttagtgtaaaaaccatttccaaaatgctataaataagttttacatctaatgtggatcagagagtaatactaagaatttgtaatttactggagagcttctaaaaataaaacatgtaataaaaatggattgtcagtagctagacatgtctgtacatactgtcagtatatacatacagtatatacatactgtcagtaaccagacatgcctatgcacactgtcacatagattgtaagtaaccagacatgtctatacatactgtcgtaccagcaccacacgcgtgaagaaagaggccctgagcagctaagctcagagcctgtcagagtgaagtgggacccccaactccagcgattgtcatagttcttcattacattcagagaagtaaatggatttgaactttaggatttttttcattcagtttaagagctcctttgcaagagttcaaggcgacactattactgatgctgtgatgtgcttatagcatagctggcctctgggaggcccaacaagaagctgactgaggcagatgcagatacttacatccaaccattggactgaagtcggcgacccttgtggttgaattagggaaaggatgtaagaagctgaggaagaaggcgacctcatagaaagaccagcagtctccactaacctggaccccagagatctctcagacactgagccaccaactaggcagcatacaggaactaatctgaggcccctgacatatacatagcagaggactgcttgatctggcctcagtgagagtagaggagcctaacattggagagacttgaggccccagggcgtgggaaggcctggcagggagtagggtatgtgtgtgggtgtgagaacatcctcttgaagacagggcagaagaggaatgagatgaggaactgtgggagggaggaccatgagggggaactgtaaaaaaaaagtaatttttaaaaagcccccccccccacacacacacaaaaagagcccctttgcattagatcttcagtaaagctggtcaaagcaacctaggctccccatcccccacactatctaaaggatctgtgctgacaggtaataacgtggaaggagaaatgggaaaatgagaggtcacaatgtaagaagatgagagttgggggcaggggtggcagtcagatgtcctaaaactggggtaacaccccaaataaagacagactcaactagcatttctgttccatacacttaataaaaggtttcagtcatactttattgaaagaataaatgtagccttttcatagctcactcctggaaagaaatacttttaaatagtattttaattttttgttgtgtgtatgtttgctatgtgtacatacacaggtacatgtaatgtaagtgcagatgtgttcaaagcatggcacatgtgacaatcagaggaatatctctgctgtgagtcctttccttccaccttcttttttttttccttattgtatactttatttaaagctacaaaatgataaacaattagcagatagatgataactgggtaacattagttagctgtttaaaccttgacatattcacaagctcccagatccttgtacagcaccaacattttagtctatgtagtcaaagtcttctggaattccaaagtttttatcaattttactttcttcaaacccaaattttcttttggcccaggattttattgcaaatatgttatcagtccatcgattggcggcttctttagctactttatttgcttcacgaatctcttccacaacctgtgggtcacattctcgatatttttccacttctgccttaagttgttgcctttagtctcgaaatgaagaaagttcttttgcaaacatggttcgttcttgcgtctcttgccggccaactcttgctttctcaatgctcttctgtaagtctgcatgcttctggcttccctctgacagctgagagttcagagcctccaacttgtgcttcctggcatgaagagccttgctcggaaaagcccagtagtaattggacgtcccgatcctctcgcagtcaaccataccgtcatccactaggcatccttcactgacatggcggttatgcctttctctttgggagcaagcttctccaggtctttcagctggaatacatcttttgtctcaaaaaatatctccatcatccgggttctcttttcctccccactcagtcctcttttctttgacatgctgcgcgaggcagcctccctgtttgagtctggcgccaacaaccgcgtggggtgggaaggacctgaggaagtctccttccacattctttgaggcagggtctggatttctctccattacataatccatgctatctggcccaggaccttgggggattctcctgactgccttccatgttgctgaaggtgttctggatatacagtgttggggcccggaagcccctggaatcctgtcccagggcccttatctaacattcttttgcttcttccactatcttgcttctgttctgtaattgactcctgcatttcacaatgagggcattgctttcattttataatgagggcactcctttcaggacctttctacaatgggggcattcctttgaccttaacgtgttagctagcactaccagtttggtctgtgtacctgagcaaattctgctcgcagttttcagctttaaaagccccccattttccttgaataaacaaggcttgaactaaacttttgtcttgcctccttccttcatgttttctgatcccaaaatttgtcattgtagcccccttccctcaagaaccctgttgtttaagtaatgcaggccagggcaatagagatgtgaggtaccatatcaggcttcacgtgggtgctgggcatatcctgtcagggcttgtatagtaagcattatacagtaagcttttctgccactgagccacagcccctgtgaagaatatttcctccaagagtgtggggtttcttatgaaagcagcaacaagtcaggactcagcttatttaaatataagtaactaaatgaaaatgtactctgctcaacaacaacaccagcagcaataagtattgcagttctatatccctaatctaaataaaatatattaccagataaacccattattcttcactcattcaagaacaaagttcatgccttcttagggggaaacctgtggatgcttaattcctgagtttgaaagttcccagtgtagcattattcaaatctttgagtgacaaatcgtaaggctagtaaaaatttattttcagaaatgagtcataattatgataatttttctttcttacagaattcaaatcaatgtctacttaatgctcaataatttcagtcccatacaacctaaagtaaatgatgtgagaacatttcataccgagagtttttcaacaagtggtctataaatgagcatttaaatgaattagtgaataaaaatccataaactgaaaagtcaagagaacagattaaagccaaaacacctttaagaattttgtgttgttccacttttcattcaataaatattcattaactaaaaacattatttgggaaatattgagacaaaaggaaaagactataaatacaattatacacatactatatatattccccccttgatcaaaaatttcagacagtgagccagaagaaaagaaagtaacacattcaaatgaaatttctttctttttttcttttttgtattactgaagactgaagctagagccttgtacatcctgaccaagtgctctactgaagtgctttctcttcagtcttttgcttttcttctgagacaaggtctcatttgtagctcaggcttgtcatgcagctatatagccaatgtagcctgcctgtcttacttgcaaggctcctcaacagcctcttaagggttggaattacttgtatgtgaaaacagacctgactatatttttttgtttgttgattggttttcttctgtgttttgctttggtttggagttctataaagttaggagttgaacccagagcttgccaagatgggcaagtcttctaccactgaactcaatctccagccctgatgcaaattaactattgtagaataaataatagatgagaaagcgtaaatagaatgtgtcagaagaaaacacattcaaagctaaacttgctaagctgtaagtgtatttggctcacaaaatacaaaatttgattcttaaaagagtctaggccttcagcagcctgggccaattgtttgcatttatcctataagcagacagaaactgctaaaacatttcaggcagtgggagctccaggctgactggggaatctgggttctgttatagaaagattattctaaatgcttggtagaaagattcatgcaaaacaaggataacttcatgaggccattgagcgtgtcgtcctgggacataaggcaagagatagaaagcaggactgtggtgatgggaaatagacacatagggaatctggggcacacttctgaggtaggagctaacaggtaaagttgtcacatcattcagggaggacttaaggatttgagcttcaatttgaatggtgagtaatgtaaaataggggtttaagcacagactgcaatgaaggcttcattaacacacaattcctctttacagaatctattgatttcctcagctgtaactaatgtagactcccctaacttgaatctgcagacaggctccagggtttcttcaactctagaatgtttggaggccatcaaaatggctcattgaataaaggtgtttgctgtcaacccttatgaccaattttggttcccataatccaaatggtaaaaggaaaaaaccaactcatacagggtgtgtgcacatacttgtgagtgctcacacacacacacacacacaatgtaataaaatatttaaaactgtttgggaaatgctgtgtgcatgtgtgtatatacgtttattgttttcctgtgacctacaatttgtttaaaaacacaaaaatcagagccaccaaagcctacctaagtctcattgatttagattagcaacctccctctacaattttttattggttattttatatatctacattcctggatatagttttatcttcctttccggtttcccctctgcaaacaccctacctcatcctcctccccatttctataagggtaatcccccacccacctacccattcctgcctcactaccctagcattcccctatgctggagcatcaaggctccaaagactaagggcctctcctcccattgaggcaagataaggcaatcctctgctacatctgcagctggagccatgggtccctccatgccagctctggggagtggtgggaggggaggatgtctagttggttgatattgttgcaaaccacttcagctcatttagtcctttccataactcctccattgggggctccatgctcagtccaatggttggctgcaagcatcaccatctgtattagtcaagatttaaaaagcttaaatttggagtagagcccagttgtagaacatgtgaggtcctgtattcagtccctatcatccagttgctcccaagtgaggtcctgcattcagttcctatcatccagttgccccaatcgcaaaactgttggcaaagccagtttatccacaaacatttacaaataggcacagaattttgatgtggactctaatagagctactcacaaaaaataaggggaaggaaaaggttctttctgtgtgtgagccatatgccagaatccaaccagatgacccctccacaaaaggcaagcagtagaattttaatggactaacacgaaagacattttaatctgattgaatagtgaacaatttaggatacttttcctttaagaaaagccagctggacacaaaacgatgactatttaaattgttcaaaactaaagaacaaactataccatttacaaaaagaatgtagaatattctatcagacacaaacaaaatgaaaactctcagcagtgaattatttccaaatatttcccaaagaggaaacaaatggtgtctatatgtcactatgggagctttgagtacagaatgttttaatggggctgacttggaaagaactatgctatcggaatggaagaaagcaggcccctccatacagcagcttttgggtgaccaaagctcctcacttaccagttagtcttcaaggtctgtaaatggaaagacaacaacagtggttttgctacatgcttatagttttctcctaataaagccaattaccagtgacccaccaccatctctaaaataataatagaaaaagaaatgtggtcactaattctgggctccaatcaagaaacaccacttctatttcttaagcagggctcactttcccaaataccttaaattgtctttccaaagctggattcatagttatacctgcttcattagggtatggtctctgtacccactccctgctaagtaataacatatttcataccataaagtaaaagctggaaaaaatggctattttttttaagtcaatggaaataaattccaccaaagactttcctctactcagtaaaactctttgcaaccatttgtaaactagtgattttaccatattgtttagagctacattagtgaccagtgccgactaaaaccttgagtctgtattttcacacttggccacccatccaggttcatgtcctgatttgatccctgtctgtcattttcttaatcgtcattaagctttattggaacaggaaattattccttttattttcatttacgttctttccagttccaaatgaatgaaacatacatggtttttgtttttatttttgaatctgcaaatgggtattttattttattttttttaaattaatttattttgtacacaccatgttttattcactccacagccaccctctgactgttccacatccaatacctcctccccatgcccctgtctccatgtggatgtccccatccccaaccctacctgacctctaaactccctggggcctccagtctcttgagggttaggtgcatcatctctgaatgaacagagacctggaagtcctctactgtatgtgtgttgggggcctcctaccagctggtgtatgctgcctgtttggtggtccagtgttagaaagatctcgggggtccagattaattaagactgcttcctcctacaggatcacccttctcctcagctttcagccttccccaattcaacaacaggggtcagttgcatccttccattgcttgggtgcaaatatctgcatctgactctttcagctgcttgttaggtctttctgagggcagccattatagatccctttttgtgagctctccatagcctcagtaatagtgtcaggcctttcgacctccccttgacctggatcccactttgggcctgtcactggaacttcttttcctcaggctcctctccatttccatccctgtaattctttcaaacaagaacaattatgggtcagagatgtgactgtgagatggcaaccccatcactttatgtcctgtctccctactagaggtgggttctataaattccctctccttactgtctggaattccatttaaggtccctccctttgagtcctggaagtctctcacctcccaggtctctagtgcattctggagggtcctaccaacttcctatctcctgaggttgcctgtttccattctttctgctagccctcaaggctacagtgcctttcccttacccaatatgagatcaggttcccctctccctaccactcccccaccatgtccactttccctcctatgtctctccctccctccccacttgtgactgctttcttctctctcccaagtgggacggaggcatcctcacttggtcacttcatcttgttgacctttttgagttctgtggaatgtatcttgctttttgattttttttttttttttgccaataaccacttattattgagtgcataccatgcacatctcttgtttctgagttacctcacttcggatgatatttcctagttccatccatttgcctgcaaaactcaggatgtctttgttcttaatagccaaatagtattccattgtgtaaatgaaccacattttctctatccatttttctgttgtcggacatctaggttgtttccagtttctgattatcacaaataaagctgctatgaacatagtagaacatgtgcctctgtggcatggtggggcatttttggggtatattcccaagagtgatatagctgggtcttcagatagatctatttccagttttctgaggaacctccaaattaatatccagagtggttgtaccagtttacaatctcaccagcaacgaaaaagtgttcctctttctccacatcctccgtaacatgtgttgtcacctgagtttttgatcttacccattctgattggtataaggtgggttgtcagggtcatttgatttgcatttctctgatcactaaggactttgaacatttctttaggtgcttctcattcattccagattccatagttgtgaattctcggtttagttttatcccccacttttttgattgggttgtttgttttttaggtgatttatttcttgagttctttatgtattttggatattagccctcattatctctcaataggagagatctcccatgctcatcgagtggaagaattatcatagtaaaaatgaccatcctagctaaggcaatctacagattcagtgcaatcctcatcaaaatcccaacacaattattcaaagacatggaaagagccattctcaaattcatctggaaatgcaaaaaaacccagaatagtgaaatcagttcttaacaataaaagaagagctggcagaatcaccatccctgacctcaagctttattacagagcaacaacaacaacaacaacaacaacaataataataataatacctgcatttattggtacagagacagacaggtcaatcaatggaataaaatcaaagacccagaaataagaccatacacttacagtcacttgatctttgacaaagacaccaaaaatatacaatggaaaaaagaaagcatcttcaataaatggtgctctttcaactggctgtctgtatgtagaagaataaaaatagacccatatttctcactttgtacaaacctcaagtccaagtgaatcatggacctcaacataaaaccagatccagtgaatctaatagaagagaaattgggaaagatccttgaactaattggcacacggggaaatttcctaaatagaactacaatggctcaagctctagtatcaacaattgataacccttctggtcggcgccagtaccaggtcaccttgggtgtggaatcggtggacactccaaggttcttattgactattataacacctatatgaccatacagttttctgttctagatctcctgccttaacctcctgtgtgctgggattataagcatgagccaccatgcccagtgtaatctaaagcatttcctttagaagatttgtcctatagagtgttcgttaagtcatttatgaaacaacaggtttaagagaggcaagtaactttgtagacagaagcaactgcccaatagcctatcttcttgagacttattctttgaaagaactgactctgacatttttctctgacctccacatgtacagtggtaccaatgcacctgtatttccacagcatacacatacatacacacaaaattagtaaaaataataattttaattttatagtcatgcaaatttgagaaatactacttagtgtaatttcttttggaagaacacaattaactctcctgatgacgttgaggaaagctatattgtattagaactagtgttttacagtgttactggactgcaagaaatttgtatcaagaaaagtatcgaggaattaacatttttccataacactgtagtaggggcacagtgtgtacatgtagacctgctcactgttggaaacatggtgatgcaataagtaattgtgcttcatggcccctgtcatgcttttcacttaataccttgaacattcattagaactcctggggcttccaaacatgaaaacagaaaagtggttgtgatagtacctacctctatcactgactgtccctaggacataacacacagtgtacatacttctgatattgtttgctttttcacagctgaacagtttaatgtacacatatttccccaatgtgatactagcacatcagtcaatataagattcctttctgttgaaaattcatagatgtaaaatttaagccaaatactacaccagaatgtaatataggtacactttcccctgccatttctattttatttaaagctcccttaatttctctgcgaacgtcattctcacttttgagccttcagagccatgtggaagtttgaggctgacacaaagcacactaattagacaaggctatcttcacactgtccacatgactgtggcctcattttatctttgtcccaggacagaagttgagataatagatacttgtgaatgacttaccctgatgtgtgcacagcagtatatcatgaccttaatcacaatcttctcaattgatcacattctacacatccatttgctctaagttacatgtcaaccatttatgtctactgccattgagtgtgctgttaattcttcattgagctactgtaatgtttatgttggtgttcaataaaggtgtggtctaaatcatcaacatgctgcactccttcatttcagcatgtaatcatatttattaaattttagttaccagttttactttccaatttgaaaattcactgaagtacctggattgccaagagcatattatccactttgtttcaaagctctgtaagtgtgctacttaaaccaagtgctttgattcttctctttaaaagggtgtgttctttcaagtgtcattaagattaatttaatacctctgcaagaaactctgcataatggtgagtacctgtaataccaatgactcagaaagctgaggcaggagaaccacagacccacaaaggtttgagagcaacttaagtaacttaaaaagactaaagtaaaattataaagggttggatatgtaggtcagtgaaaaagtgccttaactgtttttcacatccatcataatctcaaaaacaaggaaaggaggaaggaagagtaggagtaaggtagaaagagagggagggaaggtggataagggaagaaattatatttcagttagggtttctattgatccaatgaaacaccatgtccaaaaagaaaattggagagaaaagactttatttggtttacacttccattatgctgttcataattgaaggaaatcaggacagcaactcaaacagggcagaatcttggaggcagtagctgatgaagaaggcatagaggatgctgtttattgacttgactcacatggcttgctcagcctgatatcctacagaatccaggactattagcatagggacagcaccatccacaatgggctgggctctccccatttgatcgctaattgaagaaatgtcttaaagctgggtcttatggagacatttcctcaactgagtcttttcctctctggtgaccctagctagtgttgagtcccaattccagccaggacagatgggatggaatggagggaaagaaaaaggtggggaaggaagaaaagaagaaagaagaaaggaagagagacctctgaagatggggtgagggaatgcaaagatgaggataagtaacaaattctacaggatgaaaacctcttgcttattattaacctacatgaggtatgtagtattaatgaatactaattcttttattggctccaaagaataactttttatcatattatttaacacctccttgctgcacattcatctgtatacatgctaataagcctcaccaacactagtgatatggtaatttgatttaattgttgacttttacatttttaatctctagaacatatcaaataaaaaataaacaaatggagctggacctaaacactgttaagaatgtttgctgtcccatttaattatcccagttaatatattttaatttttctatcgtgattatatatttaaatatgtgttacagaaatgccttcgaaaagtttcttaaatccatcagtaattagccttgatgagcaaaattcaaacttaacaaatttattccaaatgtagcaacataacaatcatttgatatctctggaccaagagtctcactttgcatttttttttcctttactctcaatccagacagacctctgatttttgtagctttggaaacagcagaagaggtctcagaaatagtgtggagttttcatgcttggtgcccatagtaattggtagcaattggctacaggatgttgttaataagattctgtacctctgctttgagaagagatcgctgctgttgacatctgctgaggtttagcagtagaaatgggcgcagagttgtagcattttgctccttcccatttcatggaaagaggtttgggctgcaaagttgaacatcctggatttcagtgcacgttgtgctcctcagtaactttgtgactttgaagaagtcaattagctttatttttaaatttttctctcctctcctctctctctctctctctctctctctctctctctgtatgtgcaggtacccatgttgagggaaaaagacaattttgggtaatggtccttcccttccacctaatttgagaaagggtctcttactattctaccagtgaatacctcatgcgaggtgaactttgaagttccagggtttctcctgtctctgcctcctatctctctggagtgatgaatttacagattcatgctgtcttatgcaagtttgtgtagtttctgggaatatgaaccaagatttcatgcatgactggataggattttcctagtaagttatctccagtatctaacaccatgttggcatccaacaaaacaggtattatagtaattaatgtttcatattgtcttgtcttaattatgaattcctactaagatattgaagggatgagtgcagtcatttaatttaatcaaatttccagaaattaccttcagtgaccctagcgaagtaggtagttgattatcgtaatgggcccaatgtgcatgtctcctcaaacccgttctcaagttcactgtgttctttccactccttttattaacactgattttattttctgcattgtacctggttggcttgtgatttaccccccccccccaatgtgaagttatttaacccttaagagaccttagagagtctacatcttgtttagaatggagtatcaaggaaaattaaaagactaactttgccccaatgccagtcatcttccaatcaaatagtgacatcaatgagtgcaggttagacttaaagcaaaaaccacatagagaatcatggtgacaaatatatccatctcatgttgtgccctccccagccttcagcaggctgaacagaccttcagtgctttccacaatgaaccttgatgacccagttggagtcatctgccttgctgcacctgcaacttcctataggaacttagaaaactagacttcccactgagcttgctttgcaacataatccagctgaaacaaatgatagggtctgtgggcttgccctatataaacacagtgctgaatattaaacttggagccttgatcagagccttgtcttggcttcattcttctctcataccccgtccttttcatttccatcccccttttcaggtaaacccagtctccatggccactggatggctacaggtggcaccccacgttgggtgccacctgttgtgggaaatattaataaatgaacctgccagctctccgtgttcctgcttctctcaacctgccaactccctggtgaggccagactctgcccccacacttctgccactggcaactctctccagatagcccccacagatttctgctcacttgatcctgagtaaagcaaaactcttgaaccttataattaaccaaccagatttatgtatccatacattctcaatttacaagataccaatacaataatttcagagcctgttgataatttaaaagctttataccaattattctaaacttatgatagcataactacctgtgactggtgaaagtcacgttagttcatgtccactaccatcttggccttcctcctctctcctgagatgctgtctcttaactctgccccccttttccctgtccagtcataggcctcctgctgccctaatataattggacagtgaaaatcctggaacatcaagtgatactaagctcttcccaggtcatatttcatgcagtagttgaaatttgttataggcatttaaaaaatcacttcatggctatcttggggctagatagtctgtgatagacgttgaaagttggtgttagcagtcagctgagatgccatgttccctagcattatgcagtaaattagctgaagttgttaacaattagttggtctgagcatactcaaagtgtttgtgatgtatgccaaaaaggtggctcattagcaaatgatgtgtacagggataatacatacacatatacacacaaacatacaatggtgttgcatagctgctgtggcagagggtcttcaccaaatgagattggtgtaagcctatttatctttttaatgatgtattactactattaatagttcttaaaagtaatgaatgtatatgttacatgacctggggttaggtatacaaaagacaaagtttgggagtcatttttattaaattccctccatcttttcacttgttaaatattgggtcaagttatttgttaccatttgaaaagcaaagttgataaatagtggtttatggcattgacaaggaagacttgtgtgctacagtattacagctctgtctctctagtttccactttgaggagttgcttacatgagatgctagtcttcctctagctggttgatccatgcagacaaggcccacagttgctggaaactgcattgttgttatctggctattgtttgataaataggcttacaggatagtataatttaaaatataaggaggcttctcccttgtacctcagggagaaagtatggaagaagatatggaaaacttcagctgggtgatcaggggatgtgaaaatgctcataaacagcctgggaaggtcagcagtaggcagtacagtggtggaaaccacagatggtggccttggaaccttcaaggtctcacactgctcagccagatctgcccacctgtgaagccctgaatggtgaagagtgagaagaaggtagcaaaggatccagaatggttctagtctttgttcctgatacagaaagcaggaagaacggatgcttctctgttaattgcaccttagggtttgttcatatctgggatatgacactgaacttctctcaagaggcacagtaatgtccaaaggctgttcagagcacttgtatatggatgtgatgttggagaattacaaacatgtacttgttataaccccatgattttcctacctgtgagcaacagcaggatgtctgagaaggagaatggctcattttctagatatggcctcctcaaaaaaatctctatgctacccactgtgacactgctgtacatggtctggggttctggctgctgctccaggctgtgttgatgcccatgaactgtgttgctatcagaggtcatttgaatgtccaccattgctactattgccttgttaatgtctgtggtctgtgctgccatctgagctcatgttaatgcccataatctgagatgctgcttggggtcttgttggcagctgtggtctgtgctaacacctgaaattctgttgatatttgtggtccatactactaccagaggatatgtggatctccatggcctgggctccatcctgaagtcataatgatctcgatggtctgtgatgcaactggagacaatatggttgtccagtggtccacaggaaaccatatggaagtccatgatcttcctgttatggtcgggaaagcttctgttgcaggtattgatgactctagactcattcttggaaatgagaaataatgaagctttcttcaacaaactcttccctgcccctaacagaaagaagcagtctctacagaatgtcatttaagagagtccttaaaaactttgagagatgctgaagtgtagctgtttacaattgatggcttctgatgggggcatgggaaaggactcagttatttttaccggataatggggtgtttagccactggaagtgtgaccatgctccaatgagtatatgggcaacacaaattggacttgatatattttggggatggggcacaaaggtgggagaacggacctgggataaatgtgaaatgagggtgatcagggtgcaatgtgtgaaattctcaaataatcagtaaaaatactaagctggaaaaatagggaggagaaagataggcaaaggtccctcttgatgaacagaaatcatctctggggggtgggggggtagattttggcaatctacttaaaagtagaaagcaaattctttatttctaagtgttttgttgacctatgataatcaaactcccctgctagaggataattatctttattagtatcagatgccctgtgggtgggtggggcattcacctcattcaccattcacctcttgaaaaatgaactcagattaaagaaatacctcctctcctagttttctgttgttgtcaattcttggaatataagccacattcatctgtttatctctccttgtccctttctcataaaaaatcaggcctgccaagctgagctctgcacacttccctaaggccttgagtccaactgtgtgatgggtttacgtgctttgtattctggtgagactcgcaattgctggattgtggtttcattagatccccttgcttcttggctctaggcagaagtatgctttcttaaaataagaaaaaataaaggggtggggtgaagtggagaataaacttaaagaaaaaaaataacagttttgttatctctagcaagtatttagaaactgagtaagtaatacaatctctatgtctagtggattaacattaatttcttagttataacagtcagagaacattccagtctagcctttctgtttttcacttacattatagccttcaatcaattgcatatgattttcaacagtttatctgagaatgagttttgcccatcagtaggctaacgtttaagtaaggctaggctaaaacataatgttccttagcttagctgtattacataaatttttaaatgaatatttttaactcataatggatttattgagatataccatccacaagttcagaagcatatatgtatatatttacacagtactaatttatctatataattcatatgtatgtgtgtataccatagattcaagtacaaaaaggacatagaatatccatgtagttattactataagtttgctaccaaaaaccccaataaatttcagttccttttctctagaccttgatattttctcaggccagaaatgtaaatatgctaccttgctaacttgtagaatacattacaacttttgtatgtgtgtaagaaacacctgctttctttaaagatttaacttgaaatatgttgggttatacataaccaattgtaggaaccctcatgtggaacatctgttagtcatacacaaggttcaaggtatcttctcctaatgttttcagccctcctaaatcatctaatattggatacttttttatgttcctatcatttttctcaaaggaaacttgacagtgtaatcatcatgttctaactagcaaaacaccaagatatcccaatggctagtccactgcagtgtgtttagctgctggggaagtgggaggtcaggtgatgatggcccagaatagatcttgcctccagctgtaattatctcagcaagtgctggtatcactttgcccattatcatttctttgcttaaattctcctgtgtgtcaagacatctccctcaaagtaaaccaacaatcttttaaagcttttggttgctaagtatttcttttttcatttcatagtctgcaagattccaggccccaagtcaatggaactcggggcttcatgtacaaactactgcataagaatgcaactcaaagcaagccaaattgtccttaacctaccccaccgcagatgtcctcgtgtgcccgctgaggccagtagagcgcttccgtgacctacatcctgatgaagtggccgatttgtttcaagtgacccagagagttgggacagtggtggagaagcatttccaggggacctccatcaccttctccatgcaagtgagttcacagattgttcacaactgtttctttccttccttctcaaaactgatttcaagttaaatctttaatctttcttctctgtatccttgctatgttaacagagaaatggtttttgtggtctgcatttatataacagcagaaaaaaaatgttattaatgaaaggcagcttttctgtccatggcccataagtggactatggaatggtcttgtagcaaatgtctgtctgcaatgttctttacaaagcaggtgggagttatagacaaacaatttaaggggattgaatttgtttgattcgctgttgtaatgagatacaatccaaaggcaacgtggaggaagaagaggtttctttggcttgtttgtcaacactaaagccaattattgaagaaaacatggagacagaaactgaagcagagaccacgggaagcactgctcactggctcgcttctgggctcacattcagttacctacctttcttagacagccatgaccacctgcccaggggtagctctgctcacagtaagctaggtcctctcccatcaattagcaaactagaaaatgcccctacaggccatgcccacagacaaatctgatgggggcaatttctcaactgagatttttggctgcccaattgtttctaggttgtgacaagttgacaaaaactaaccagcactgggaatttacatgagaactagagcaagagaattttgttttcttgtttgttcttgtttttgttttttctgctttgtggtaagtattctttgagcatgcacaggctcagcccttctgtggttcctaggagagcagtgatctgacagctagtgtgagcctcctcttcatagtgcttacttttctccagaagtgatgcaaactgcattgatgggtcgtaggctgctacagtgagtttattgcatatagcctactacaaaatgaagacagcaggttttcagtcactagagatctgcaaacggaacttccatcagactcttcaggttgtgagaaggatgtccatgatgtttgtcatcagttgggagctcagtacattgtcaatgaccccatgagccccttcagatccctatggataggggtggggacagtagcacatgtataagggcccttgtgtttagatgcacactaacttcacttctccactggtaggaaatcagtgtctccagcacatgggaactgtatcctcagctcttcacactcagcagcatgtccaatacctacatcatttattccctctagttgccagtcacattgtattcacagtcaggaagcccagaaggaaaagtttttttcttttcatttagcaccaggacattgacccagggaatgctgaggcccatatttagcatagatctttcgtcctcaattagtctaatctataatctccctggtaatatctagagatttgttcgaaaacacaacttgagtcaacctgacaactaattattagtcaccacaccatccttacacactttccttggattgttgccatagacatccaaagacaacagatatagaagccaacatattgaaggctttgacaaaagatcttcatctctttctcaaaacacaaattccggcttgtctttatggagactatctaagcattcctagaaatacaacttgagacagtacttcagcttgggatgagtttataaaacagtttatagaacagtgacaaactgttttcaagtagaccaggtacagaaaattaatgagaatatgtaccaggaaatgccagttaagaaaaataattccataaatatgatacctaactatgggtagaattggagaaattttgcataagtactattgtgaaactgttttatttagtttttactagatattttctttatttacatttcaaatgttatcctctttttgcctatcccttccccgctccctctgctcaccaacccacccacccccacttctggccctggcagttctctatattggggcatagaaccctcacacacaggaccaagggactctcctcccattgacgactgactaagccatcctctgctacatatgcagctagagaaatgagttttaccatgtgttttctttggttgatggtttagtctcagggagctgtggggttactggttagttcatattattgttcctcctatggggctgcaaaccccttcgctccttgggtcctttctctagcaccttcattggagaccctgtgctctgtccaatggatgactgtgagcatccacttctgaatttgccaggcactgacagagcctctcaggagacagctgtatcaggctcctctcagaaagctcttgttggcatccacaatagtgtctggttttggtggtggtttatagcatggatccccaggtagggcagtctgaggatggtcattccttcagtatctgcttcaaactttgtctctgtaactacttcacaacttcaatgggtattttgttccctcttctaagaagaatcaaagtatccacactttgatcttctttcttcttgaatttcatgtgtttgtgaactgtatcttgggtattcccagtttctgggctatatccacttatcagtgagtatatatcatgaatgttcttttgtgcttgggttacctcactcaggatgatatccttcagattcatccatttgcctaaaaatgtcataaattcattgtttttaatagctgcatagtactctattgtataaatgtactacattttctgtatccatttttctgttgagggacatctaggttctttccagcttcaggctattataaaaatggctgctatgaatatagtagaacatgtgtccttattacatgttgcaacatcttctgggtatatgcctaggagtggtattgctggcccctcaggtagtactatgtccaattttctgaggaaccaccaaactgatttccagagtggttgtaccagcttgcaatcccaccaacaatggaggagtgttcttcattattcacatccttgccagtatctgttgtcaccggagttttttatcttagccattttgactggtgtgaagtagaatgtcagggttgttttgatttgaatttccctgatgactaaagatgttgaacatttttttaggtgcttttcagccattcagtactcctcggttgagaattcttcttttagctctgaatcccatttttttaatacctttattgttgagttctttgtacatattggatattagacctctatcagatttaggattgtttaagatcttttcccaatgtgttggttgccttttggtcttattgacaatgtccttgccttgcagaagctttgcaattttatgaggtcccatttatcagttcttgatcatacagtacacgccattggtgttctgcttgtaaatttttcccctttgcccatatgttcaaggctcttccacattttctcctctataagtttcagtgtctctagttttatgtggagttccttgatccacttagacttgagctttgtacaaagagataagaatggatcagtttgtattctactacatgctaactgccagttgagccagcaccatttgttgaaaatgctgtcttttttccactggatggttttaactgctttgtcaaagatcaagtgaacataggtgtgtgggttcatttctgggtcttcaattctatttcattgatctacctatctgtcactgtaccagtaccatgcagattttatcacaatttctctctagtacagcttgaggtcaaggatggtgattccaagagagattctttcattgttgagaatagtttttgctatcttaggtattttgttattccagatgaatttgcaaattgccctttctaactctgtgaagaatgcaattggaattttgatgggaattacattgaatctgtagattgcttttggcaagatagccatttttactgtattaatcctgccaatccatgaggatgggagatcttaccatcttctgagaccttctttgatttctttcttctgagacttgaagttcttatcatataggtctttcacttgctgagttagagtcacaccaaggtattttatattatttgtgactattgtgaagggtgttttttccctaacttttttctcagcccttttatcctttgtgtagagaaaggccactgatttgtttgagtaaattttatatccagctacttcactgaagttgtttatcaggtttatgagttctctggtggaatttttggggttactcatgtatactatcatatcatctgcaaatagtgatattttgacttcttcctttccaatttgtatccacttttcatttgatcttcttttgttatctaattgctctggctcagattccaagtactatattgaataggtagggagagggtaggtgaccttgtgtagtacttgattttagtgggattgcttcaagtttctgtccatttagtttgatgttggctactggtttgctgtagattgcttttattatgtcaaggtatgagccttgaattcctgatctttccaagtcttttattatggatgggtgtgttgaattttgtcaaaagctttctcattatttgatgatcatgtgtttgtttttttttccccctttgagtttgtttatatagggaattacgttgacgtgtttctgtttattgaaccattcctgcatccctgggacgaagcctacttgatcatgatggatgatcattttgatgtgttcttggattcggtttgcaagaattttattgaatatttttgcatcaatattcataagggaaattggtctgaaattgctctttctttgttgggtctttgtgcggtttaggaatcagtgtaattgtggcttcatagaattaattgggtagagtaccttctgtttctattttgtggaatagtttgaggagtattggaattaggtcttctttgaaggtctgattgaactttgcattaaacccatctggtcctgggccttttttggttgggagactattggtgactgcttctatttctttaggggatataggactgtttagatcatcaacctgatcctcatttaactttggtacctggtatctgtctagaaaaatttccatttcatccaggttttccagttttgttgagtaaaggcttttgtagtaggatctgatgattttttgtatttcctcagattttgttattatgtctccctttttatttcttcttttgttaattaggatattgtccctgtgccttctagttagtctgtatctattttgttgattttctcaaagaacaagctcctggtttgattgattctttctatagttcatttcatttccacttgattgttttcagccctgagtttgattatttcctgctgtctactcctcctgggtgaatttgcttccttttgttctagaacttttaggtgtgctatcaagctgctagtgtatgtactctctagtttctttttggcagcactttgagctatgggttttcctttcaggactgcttccattgtgtcccataagttttggtatgttgtggcttcattttcattaaacactaaaaagtctttaatttctttcttcatttctcccttgaccaagttatcgttgagtgttgttcagcttccatgtgtatgtgggctttctattatttatgttattatggaagatctgtggtgatctgataggatgcatgggattatttcaatatttttgtatctgttgagtcctgttttgtggctgattatatggtcaattttagagaaggtaccattagatgctgagaagaaggtatatccttttgttttaggataaaatgttctgtagatatttgttaaatcactttgtttcataacttctgttagtttcactgtgtctctgtttagtttctatttccatgatttctccattgatgagagtggggtattgaagtctcccactattattgtgtgtggtgaaatgtgtgctttgagctttactaaactttccttaatgaatgtggatgctcttgcatttggagcatagatgttcagaattgagagttcatcttggtagattttacctttgttgagtatgaattgtctctccttgtccttctagataactgtaggttgaaattcaattttattcgatattagaatggctactccagcttgtttcttggaaccatttgcttggaaaattgttttcaagccttttactctgaggtagtgtctgtctttgtcactgaggtgagtttcctgtatgcagcaaaatgctgggtcctgtttacatagccagtgtatttgtctatgccttttcattgggtccattgatattaagagatattaaggaaaaataattgttgcttcctgttatttttgttgttagagttgggattctgttcatgtggctcctcttcttccacatttttccaggcaactttagcaggactcctggtgccatcaaactttcctttagacttatagtcagcaacatccttctcattcttttccttcagctttgctgtcttggtgatgtaaggctgctttttcactgtcacttaagttattccacatttcacccagcttttgtgccacatctccaatggtgatgccagtttttatggatttgatcttggggcagaattcctagcagaatgagaaaaatgcagatgaaggccttttggggccatttgggtcctccttcttcttgcctccatttgctggtccataatctttcatctcctaaccgtagcggactttatctgcctttgccatttcatcaaactttgatttctctttgctagacatggctttccacctctcagagcacttcttgaaaaactccacaaaattgactagaacctctgggttttgcttcttatgttctttcttgcatgtctgcctgaagaaggcataagcagatatcttgctgtttggtttatttggggtcacctttatccatcctgactgtattgttcattagtcttgtgaaatggtttgaaaactacttcacattaacatatgtatgtatctcatgatcctgtgtaccctttccccctcgtcgtacacatgcaccttcaaggacaaagaactggggttttacacagtaatcttatctaatcttatcttaatcctccactatctaatagctttggtcctgtcaagttatcttcttaagtattagttgggaactatgagattgcttttagaagccactaatgatttatggttcaaatttgaaaaggtttgatgtacatgtcagacatatgcttaacctatgtcctaaaagggcatgtatcctttcctcctgtcatgctcacagagaagtatatttagccaaaaccactgagcagtaattctattttgaaactgtgttgcaaagaagtttgctgccttctctttagaacacctgctttcagttttactccacttggagactgcgcctgtgtgcttattttcagcagtgacacagacaattgacaataatcctattggctgtgagaagctaggaggaggaaggggtacatgcaagggggtctacccacaacagtcactttacttttctggctcagggtcaggagaacttgaaaagactgtttcatctgaacttcatcttcttgctaaaaggatttcttgaggagaaactgaatcagatactaattaaatgacttctgatttaaagataaataaaccatgacactttgcctccccaaacatcttcagtcttatttttaatgtgattaaaaccatagatgaaaccaaagagcatggaaaatagaaaggagtggcctgctggataattcatatcattttttacataactcctcactcagaaagaaatggggacctgtctggtcccacacatttgaaatgaatggtccccatgagactactacaaattaacacacaatgaaattggatctaaattattaatgggcaatatttctgaataagcaggcaatgccatcattcagttctcaccccaactccatttcttttttcttcctctttttctaggatggtcctgaagctgggcagactgtgaaggtgagtgcttattatgtgcacacaaattaatacaagtgattatgggaactaataaaaaaccacaccgagccatttgcagcacattgctctttcattatgttatcttcgaggtcagagagaccctcggtgttagagccataaatcctgacattataaactgtgccaaacagtatgtttcccattagtttacaagacatttaccctttgtagtaaaattattactgtgcaattgctaaaacagaaactaaacagaggagtcctaaaacataacagggcagggtagaacaacttcctgtgggctatatgggtcctgtatagactaaggcacctggtatatctttagctcttagcacaatgtaattttatttgttccttctgagtaaaggggcatcctggtgtgtgtcaagtgcctccctttccaccggtcttctccttaggcacacaccgttctcttctctctagctactaaataccaaagatcaaacttaatgggatcaatggagttcaaaatggttttaaagtgtgctcgagagggaaggaggatttattatgatagcctctgatcatagtaaaactaaaatcctggcgggttatgaagcaagaatccagcttctttcacagaaatgtgaattcctgtggttaggttcaatgcttaagtgatagagaaggacgggttttatggtggtaacaataagaagcaagttacaatatgctgcagatgtcatacatggggaaatagagcttttggatttcctggctggccttgattgacaaggtaacttgacgccaagtcataccaactaaatatggtgactttctgatcttagtttgtattggctccagtgtataactatagtgaaactttgcaaataggagatctgggaattttcattgggactgaatgtctcaaagggaaagctaggaaattccaaataaccaaaagagtgaccccaatttctccaaacacatgacatggaaaacttgacaaaggatagggacattcaactttcatccattcctctgtcccctccccccatgttaggcagatgttaaaagaggatgcaaaatcagtgttttggctttgaaactgattcttgaaatgtcaaggtattcaagcttggctaccagagttctaaaactcagaattcaaatgtaaatttaaaatgcactgagttagttaacatgcataaaatatctctttggtgcagtttctgaagccactgactgcactggaggcaggcagtggcacaggctgcacaactgtatagtacaacacacaaattggtagcacacatattaaacatagctgaaatttgtgtgaacaggcagattatgtgctctaaagattttatttcaaaattctaaaggggcatttacattattttctataaaaatgggcttgaatagaaaaaagtaacttcaaagttgttaagtccagaaggatgaacgagacagtgactgctaatggctgtctcttgtggttgatagatgttatgttatttgggagatggagattgtaattttattatttttttaaattacctaataagcgggtcgccatcttggtccgagacccgccgaacttaggaaattagtctgaacaggtgagagggtgcgccagagaacctgacagcttctggaacaggcggaagcacagaggcgctgaggcagcaccctttgtgggcaggggacagccagccaccgtccggaccggaggacaggtgcccacccagctggggaggcggcctaagccacagcagcagcggtcgccatcttggtccgggacccgccgaacttaggaaattagtctgaacaggtgagagggtgcgccagagaacctgacagcttctggaacaggcagaagcacagaggcgctgaggcagcaccctttgtgggccggggacagccagccaccgtccggaccggaggacaggtgcccacccggctggggaggcggcctaagccacagcagcagcggtcgccatcttggtcccgggactccaaggaacttaggaatttagtctgtttaggtgagagtctgtaccacctgggaactgccaaagcaacacactgtctgagaaaggtcctgttttgggccttcttcttcggccaggaggaggtccaaatacaagatatctgctcaccttccctgtaagagagcttgccagcagagagtgctctgagcactgaaactcagaggagagaatctgtctcccaggtctgctgatagacggtaacagaatcaccagaagaacaatctctaaacagagtcaactataactactaactccagagattaccagatggcgaaaggtaaacggaggaatcttactaacaggaaccaagaccactcaccatcaccagaacccagcacacccacttcgcccagtcccagggaaccccaacacacctgagaacctagacctagatttaaaagcatatctcatgatgatggtagaggacatcaagaaggactttaataaatcacttaaagaaatacaggagaacactgctaaagagttacaagtccttaaagaaaaacaggaaaacacaatcaaacaggtagaagtccttacagaaaaagaggaaaaaacatacaaacaggtgatggaaatgaacaaaaccatactagacctaaaaagggaagtagacacaataaagaaaactcaaagcgaggcaacactagagatagaaaccctaggaaagaaatctggaaccatagatttgagcatcagcaacagaatacaagagatggaagagagaatctcaggtgcagaagattccatagagaacatcggcacaacaatcaaagaaaatggaaaatgcaaaaagatcctaactcaaaatatccaggaaatccaggacacaataagaagaccaaacgtacggataataggagtggatgagaatgaagattttcaactcaaaggtccagcaaacatcttcaacaaaattattgaagaaaacttcccaaatctaaagaatgagatgcatatgaacatacaagaagcctacagaactccaaatagactggaccagaaaagaaattcctcccgacacataatagtcagaacatcaaatgcactaaataaagatagaatactaaaagcagtaagggaaaaaggtcaagtaacatataaaggcaagcctatcagaattacaccagatttttcaccagagactatgaaagccagaagagcctggacagatgttatacagacactaagagaacacaaactgcagcccaggctactatacccagccaaactctcaattatcatagagggagaaaccaaagtattccacgacaaaaccaaattcacgcattatctctccacgaatccagcccttcaaaggataataacagaaaaaaaccaatacaagaacgggaacaacgccctagaaaaaacaagaaggtaatccctcaacaaacctaaaagaagacagccacaagaacagaatgccacctttaacaactaaaataacaggaagcaacaattacttttccttaatatctcttaacatcaatggtctcaactcgccaataaaaagacatagactaacaaactggctacacaaacaagacccaacattttgctgcttacaggaaactcatctcagagaaaaagatagacactacctcagaatgaaaggctggaaaacaattttccaagcaaatggtatgaagaaacaagcaggagtagccatcctaatatctgataagattgacttccaacccaaagtcatcaaaaaagacaaggagggacacttcattctcatcaaaggtaaaatcctccaagaggaactctcaattctgaatatctatgctccaaatacaagagcagccacattcactaaagaaactttagtaaagctcaaagcacacattgcgcctcacacaataatagtgggagacttcaacacaccactttcaccaatggacagatcatggaaacagaaactaaacagggacacactgaaactaacagaagtgatgaaacaaatggatctgacagatatctacagaacattttatcctaaaacaaaaggatataccttcttctcagcacctcatggtaccttctccaaaattgaccacataataggtcacaaatcaggcctcaacagattcaaaaatattgaaattgtcccatgtatcctatcagatcaccatgcactaaggctgatcttcaataacaaaataaataacagaaagccaacattcacatggaaactgaacaacactcttctcaatgataccttggtcaaggaagggaataaagaaagaaattaaagactttttagagtttaatgaaaatgaagccacaacgtacccaaacctttgggacacaatgaaagcatttctaagagggaaactcatagctatgagtgccttcaagaaaaaacgggagagagcacatactagcagcttgacaacacatctaaaagctctagaaaaaaaggaagcaaattcacccaagaggagtagacggcaggaaataatcaaactcaggggtgaaatcaaccaagtggaaacaagaagaactattcaaagaattaaccaaacgaggagttggttctttgagaaaatcaacaagatagataaacccttagctagactcactaaagggcacagggacaaaatcctaattaacaaaatcagaaatgaaaagggagacataacaacagatcctgaagaaatccaaaacacaatcagatccttctacaaaaggctatactcaacaaaactggaaaacctggacgaaatggacaaatttctggacagataccaggtaccaaagttgaatcaggatcaagttgaccttctaaacagtcccatatcccctaaagaaatagaagcagttattaatagtctcccagccaaaaaaagcccaggaccagacgggtttagtgcagagttctatcagaccttcaaagaagatctaactccagttctgcacaaactttttcacaagatagaagtagaaggtattctacccaactcattttatgaagccactattactctgatacctaaaccacagaaagatccaacaaagatagagaacttcagaccaatttctcttatgaacatcgatgcaaaaattcttaataaaattctcgctaaccgaatccaagaacacattaaagcaatcatccatcctgaccaagtaggttttattccagggatgcagggatggtttaatatacgaaaatccatcaatgtaatccattatataaacaaactcaaagacaaaaaccacatgatcatctcgttagatgcagaaaaagcatttgacaagatccaacacccattcatgataaaagttctggaaagatcaggaattcaaggccaatacctaaacatgataaaagcaatctacagcaaaccagtagccaacatcaaagtaaatggagagaagctggaagcaatcccactaaaatcagggactagacaaggctgcccactttctccctaccttttcaacatagtacttgaagtattagccagagcaattcgacaacaaaaggagatcaaggggatacaaattggaaaagaggaagtcaaaatatcactttttgcagatgatatgatagtatatataagtgaccctaaaaattccaacagagaactcctaaacctgataaacagcttcggtgaagtagctggatataaaattaactcaaacaagtcaatggcctttctctacacaaagaataaacaggctgagaaagaaattagggaaacaacacccttctcaatagccacaaataatataaaatatctcggcgtgactctaannnnnnnnnnnnnnnnnnnnnnnnnnnnnnnnnnnnnnnnnnnnnnnnnnnnnnnnnnnnnnnnnnnnnnnnnnnnnnnnnnnnnnnnnnnnnnnnnnnnnnnnnnnnnnnnnnnnnnnnnnnnnnnnnnnnnnnnnnnnnnnnnnnnnnnnnnnnnnnnnnnnnnnnnnnnnnnnnnnnnnnnnnnnnnnnnnnnnnnnnnnnnnnnnnnnnnnnnnnnnnnnnnnnnnnnnnnnnnnnnnnnnnnnnnnnnnnnnnnnnnnnnnnnnnnnnnnnnnnnnnnnnnnnnnnnnnnnnnnnnnnnnnnnnnnnnnnnnnnnnnnnnnnnnnnnnnnnnnnnnnnnnnnnnnnnnnnnnnnnnnnnnnnnnnnnnnnnnnnnnnnnnnnnnnnnnnnnnnnnnnnnnnnnnnnnnnnnnnnnnnnnnnnnnnnnnnnnnnnnnnnnnnnnnnnnnnnnnnnnnnnnnnnnnnnnnnnnnnnnnnnnnnnnnnnnnnnnnnnnnnnnnnnnnnnnnnnnnnnnnnnnnnnnnnnnnnnnnnnnnnnnnnnnnnnnnnnnnnnnnnnnnnnnnnnnnnnnnnnnnnnnnnnnnnnnnnnnnnnnnnnnnnnnnnnnnnnnnnnnnnnnnnnnnnnnnnnnnnnnnnnnnnnnnnnnnnnnnnnnnnnnnnnnnnnnnnnnnnnnnnnnnnnnnnnnnnnnnnnnnnnnnnnnnnnnnnnnnnnnnnnnnnnnnnnnnnnnnnnnnnnnnnnnnnnnnnnnnnnnnnnnnnnnnnnnnnnnnnnnnnnnnnnnnnnnnnnnnnnnnnnnnnnnnnnnnnnnnnnnnnnnnnnnnnnnnnnnnnnnnnnnnnnnnnnnnnnnnnnnnnnnnnnnnnnnnnnnnnnnnnnnnnnnnnnnnnnnnnnnnnnnnnnnnnnnnnnnnnnnnnnnnnnnnnnnnnnnnnnnnnnnnnnnnnnnnnnnnnnnnnnnnnnnnnnnnnnnnnnnnnnnnnnnnnnnnnnnnnnnnnnnnnnnnnnnnnnnnnnnnnnnnnnnnnnnnnnnnnnnnnnnnnnnnnnnnnnnnnnnnnnnnnnnnnnnnnnnnnnnnnnnnnnnnnnnnnnnnnnnnnnnnnnnnnnnnnnnnnnnnnnnnnnnnnnnnnnnnnnnnnnnnnnnnnnnnnnnnnnnnnnnnnnnnnnnnnnnnnnnnnnnnnnnnnnnnnnnnnnnnnnnnnnnnnnnnnnnnnnnnnnnnnnnnnnnnnnnnnnnnnnnnnnnnnnnnnnnnnnnnnnnnnnnnnnnnnnnnnnnnnnnnnnnnnnnnnnnnnnnnnnnnnnnnnnnnnnnnnnnnnnnnnnnnnnnnnnnnnnnnnnnnnnnnnnnnnnnnnnnnnnnnnnnnnnnnnnnnnnnnnnnnnnnnnnnnnnnnnnnnnnnnnnnnnnnnnnnnnnnnnnnnnnnnnnnnnnnnnnnnnnnnnnnnnnnnnnnnnnnnnnnnnnnnnnnnnnnnnnnnnnnnnnnnnnnnnnnnnnnnnnnnnnnnnnnnnnnnnnnnnnnnnnnnnnnnnnnnnnnnnnnnnnnnnnnnnnnnnnnnnnnnnnnnnnnnnnnnnnnnnnnnnnnnnnnnnnnnnnnnnnnnnnnnnnnnnnnnnnnnnnnnnnnnnnnnnnnnnnnnnnnnnnnnnnnnnnnnnnnnnnnnnnnnnnnnnnnnnnnnnnnnnnnnnnnnnnnnnnnnnnnnnnnnnnnnnnnnnnnnnnnnnnnnnnnnnnnnnnnnnnnnnnnnnnnnnnnnnnnnnnnnnnnnnnnnnnnnnnnnnnnnnnnnnnnnnnnnnnnnnnnnnnnnnnnnnnnnnnnnnnnnnnnnnnnnnnnnnnnnnnnnnnnnnnnnnnnnnnnnnnnnnnnnnnnnnnnnnnnnnnnnnnnnnnnnnnnnnnnnnnnnnnnnnnnnnnnnnnnnnnnnnnnnnnnnnnnnnnnnnnnnnnnnnnnnnnnnnnnnnnnnnnnnnnnnnnnnnnnnnnnnnnnnnnnnnnnnnnnnnnnnnnnnnnnnnnnnnnnattggaaatgtaaatgagctaaatacctaataaaaaaaaaaatcacaaaaaaaaaaaaaaaaattacctaataagcattgagagtccagcaggactgaagaccatggctatagagtttcagattccaatagcagtatcatcatacttacctgaacaaattgtcaagtttctgttagctttaatcgtggtgataagggattgacttataatataaagcaccaatgtgtgaattactggatgttcttactataacccacactgtttagcttaagctaatttctgtaaataattgtatccctttaaaagaaataagaatattacattttgaaaatttgttgttgtttccagactggtcacagcagttcctcagtataaatgtgttgtggggttaactcacatcccttttggaacataatacataaagaaaaattcatcacacacacacacacacacacacacacacacacatcttacctgcacttgacagtgaacttttgttactgttaccctaagtcctcctatctacaagttatcaaattttgatctttataccaccttgcatgaaattttacctgggagtcagctaaacaatagtcactaccacaaagacaaatcctctcagctgttattttaatagaatctaataattcacaatgccatgggcagaatagggagccctcattattattaagaaatatacctggtctctttttttttccagacaattctatttctcagccttggtactttcgggtgacagagtagctcatagatggtgttcttgtaagcaggatgtatggaatccagccctgccgcactagcagcttctccagagagtatagcaacaccttcagaatccagctgtcctagttggatagttcttgtcaaggctggaagtatttcatgttttaaaattcacacagctacacattttgaagggaggttggtcagcctaccatggaaagtatggggcctttccttttttctttttttccttagcctgagcgtgagattctcagtgctgtcttatgtctgattcctgggttctaatccacttttgtctcatgccaggtagtaatagcaataagcctactaatggcctttttccctgaagcaagtattgctattgttaatgagggcacaccactgagttagcctcttgaacaggatggtgcttcagggaaatattttcccgagactttaaattctgcctagcaatgcacaggctggcctggcttactcagtaagacccttggaacaaggaaaggaaaatattgacgtaaaaagtgatctcttatttcataattgattatttggttttcttctcgagtttaaaaatagaacacttctgggcatggagtgattattgcagtgatgtggctatcctacaggtttgaaaactaacctctttctcttctctgctactcagcccttccctgacacccacccaagctgccctgttgtctagctggattcctctcaaggaatttttcattatctctgacacattggcttgtttacgtatgttcctttgttccctgttgtttcttttgtctccagggagtatatatacactttgtgattttggatgatacttagactgcattgcccttggcctctggaatggtttaccatgaatgaaactggggaaactgggaggaagaaggtctttttttagacctattccactgttctcctaatcattaatcaaagaatgatctgatctacttgcgccaaaggaggtataaggtcagaaagtgactgccttttgcaggcatactgtgaaggctgaacatgcaggccttgatgagtcatctgggcttatcactgttagatccaagtgctactttctcttcctgtcacttcctcctgtctgtaaagatactctgtcctgtttcttttgctgtttgtatctggagctcccctcagcctagaaaatttacctcaactgaatgtgcaacagttttcccttcacaatctgagccaccactgtggtgatcgagtaataggactgaaagcatacttctctccatacttcagctgcggtgccattttaacggagacactgtgaccttctgtgtggagacaattatctactcccatgtttctatctttagtcatcaggaagttggtgttgttgtatatgtgttttcctttgtgcagtcaaacatccaggtttcctgaaatgtctatgaaatattccccatgtattgtggtcatcacaatacatggtattgtgtgaattttccataaattatgttcttaaatccaaatcctgagtgtaattctagccaaccagaagccctaatgcttattcattccttcaaaagggttcctttctaattagcttagtgggaagcatcttcttgatgctgttgcatgaccgtctttgggtagaggatattgtaggtgcattaaggaaagcgatttattccagatgggtaatcagaatctcagatacttgcaggtcctcgtcctcgtcctgtttatagtatgtgggtgctgcacttgaaggtttaattttatactattaaggtagaaaagatttcttaataacttgaaatattaggaattacttctgacattgctccagcagaaaaagaggtgtgtgttctttaaagaaatattatcaaaaactgtctttaatctcctgtagcctctttttgtttcctggaccatgtcctacacatgacatggagatctggtcatcttacagtttagtgcacaaagaggacacttagctgtcaataaaatgagagacttgatgtaatgtggcatgtcagaagtgccatgtaaaggtgagctcgataactttgcctctctggaacaggctcaaaactgtgagccctgattttctcattttctaaacggaaactattgaattgtttggtgataagaagaggctgacatgaacgcataaggaatatattagatactgggtaggatttattcacatatatgcgatttgaacccagataaccccctttaaatcccagatttctcaccacatgctggtatttgtgtgtacttgtagctctgtgtgtgtgtgcatgtatttgtagatatgtgtgtgtgcatgtgtatgcctgtgtatatgtataagtgaatgctatgtgagtgtaagtgtatgtatgtatgtggtgtgtgcatgagtgtgtgtatctatatgtgagtatgtatgtgtttgttaatggatgctacagataactttgggcatcatttttcagtgtctttctaacttggattttattgaatcagggtctctcattgacctggatctcaaaaagtacaattggctacatggccagcaagccccagtgatcattttgtcttgctatttcaatgctgggattacaagtacacatactatatctaggttttttacatgcacattatagtcatagaagccaggtcgtaatgcttggctagcaagccgtttactgattaagctatctcacggtcctgtttttcttttttgtatttgtctatgcctatttgtgtatgtggcatgttgacatttgtgtttgtgaatcctggtatactcaaaccagatgggcacagggcatatgtagggatcagagtatagtctttggtaagagttctcaccttctaactagagacaggttctctctctctctctctttctcccctccctctccctccttttctctcttttcccctctttctgtctctgtctttgtctctctgtctatctctctcagtctctttttctctgtctctgtcttggtctctctgtctctctctgtctctgtcttggtctctctgtctctctgcctctctctctctctgcctctctattggtctctctctccctctctctgtctgtctctgtcttgtctctctgcctctctctctctctgcctctctatctgtctctctctccctctctctgtctgtctctgtcttgtctctctgtgtctctgcctctctctccctgtctctctctgtgtgcgtgtctgtctgtctgcctctccctgtctctctctcactctccctgtccctgtctctgtccctctccctctccctttccttttccctctccctttccttttccctctccaactccaactccatatgaaaacttaaacctacctggcctatgagcttcttgagactttgctgtctccatctctcatctctctgtagcatagtgagataactgatgtacctgctgcacattgcttacgtggcttctgaggattcaaacataggtccttatactatgtaacaaggatcttcacccactgatccatttcccagcaccagtacaccagtgtataccagtagtatttgttgtattaattatttaatctcaaatcaagatcatttagttcccagataaaaaaacacgtaacctttattcttgtaataagtatttatagtactggagttgggcagatatctgccccctaagctgttagaatatatttttccatcaataagcccaagttgcaatttgccatgttccatctgggcagctcttaactccaactggccagcccttgtgccatattttcatgattcctgccccgtgtcttcttgccctctctctgtcttctctttctctttccctgtggcctcctgcctccaacatcaagcccaggaacccaaaaccccacctatatctctttttccaagctagagactggagtcatatttatgcaccaatcaagataacttgggatgggaacaaggttatagagtgtgacttgggtttacttgccaattctctcatccctggggacaaccaggtcttgggtatcagtgtttaccattacaataactagcaaaataccaaatctcaacaattattttctgtaatatgttttgctttcttctttttaaaaattttaatatctgtttgtttgtttgtttgtttgtttgagagagtatctatctatatagtcctagctattctggaactcgttatatagatcaggctagctttgaactcaaagagatctgtctcatctttctgctgagtgatgagattaaaggtatgcaccactaaaactggatttttaaattaataacaatttcactagtattttttaacctttatttaaccttggatatagatggaccttagcagtgtgagcctgacatgggaattgtggctccacgctgactttgttaatatgcactacattttctcacaactagttactgcccagtagcttaaatttttgaagagcttttggtctgatcatataacttggggtttttgaaagaaatggtttaaatttgttatgataaatgacactcgatctgggtatggtgacacactataactccatcatttgggaagcagaagctgagaagcaagttcaagactcacttgaattaaaaagtaaggctttacctttttcactcccttgcccccgcctcttcatacttgtggacatacatacactgaacacacatccacacttacacagttccatacacacacaaacacacacatatcatatatgaaacaatttgaaaattcaaaaatgtacattcttaattggaaaatgattatttatcttgatttattcattgtctgttctgaatattggtgtgtctgattatttcctgtgaatagatcaatagtgcccagaaaacttgtctaaagtgggtttccactagaaaaccttgtcccctgtgctgatttcatcagtgggggaggatgcagaagtttgttttgacagataccatgatgattctgaggcatcttacatcctgaggcaaatctatgaaaggataatgagaaacagacatggaaggttgtccatggactcagcatcttcatcccagacgtattgtaaaggatgatgttgtgtgctcagggtggggaaacccatagcttgataatgaaaaagatttgggtctgttatttattattttcatttgaaatgaaatttccagagagcttcaatctgccacaagtcttttatcctctgatgaaagccaccgtgaatgttgccttgtctctgtttatacctaatgcatgtatttactgccggaagaattagtgtcttcaggatgcggtagcttttatcttgtagaattgccttataatttgcatctgttcccagagtaaatctaatttgactgagctcaataaaccaaacacagttgtgatattcagtagacattttgagtgtacttactgggactggctactttgaaaagtggcagaactccaggccctctggcctgttgatctgatgctttccccccaaacccttgaacactagctctcctggccaaagaagacaccaatgtcctccttaggaaacacttttgttcctcttaaaccttcaagtttcttcctaagtaggtatcaaaagagtaaaattttacttttctttttgtttagtgttcagcacagtggtttttatttatcaatgtgtctgttaccttcctcttacaatgtctgtccttccatttacccccaaaaagggcagtgaaggaagagcgttttgaggatctgtgccccttggcagttacgaaggagatagcaatgaaaacaatctttgggtgtgattgagattgacaatcaggaattctaaggcagagtaggaaaaggctggcaaagaaaaggcaagaaggatagaaaggacaggcacaggggcgaagatgtgtttctgcagagaaagcctcaagtagtaagtagcaattacctggtctgcagaagagaggtggagcttgaacgcagaggaggaagtggaaatcaaggaaggctgtagaagaacctagttagcaatgagagtcctcattattctaaggcaagcacaaggatatagaaccaattctgtgttgcagagaacataatatttatacaacctctccctcttctggaacattgtttgttgtgctgatgagaagttcctttcttttcctgctgtttctcttctgagctttagcagcttcttctatcacccagaccttacccagatgtttccatttgatcttctcacccagagtagtgatctagaatgaatgtccctctttctaggtatacttcattcccctagagaaggggaaagattcaaaccttctccatttccactttgactaacttgtatttgcataatgtctgttgggtcataacaaaggaaatccaagatctgagatattttcatgctgtaacgtttttagattgtcgttttttaaaaatattttttattacatattttcctcaattacatttccaatgctatcccaaaagtcccccataccctcccccccaattccctacccacccattcccatttttttggccctggcgttcccctgtactggggcatatacagtttgcatgtccaatgggcctctctttccagtgatggccgactaggccatcttttgatacatatgcagcagagtcaagagctccggggtactggttagttcataatgttgttccacctatagggttgcagatccctttagctccttgggtactttctctagctcccccattgggagccctgcgatccatccaatagctgactgtgagcatccacttctgtgtttgctaggccccggcatagtcatttttatgtcttacatttggtgactaaccaggaaaggatagaagcaggggttttcgctggctggaaagaaatgcaaggctgttgagatacaattagaggagatgactccaggaccagactgcccagtttcaaacacagatgcttcacctgccaagtgcatctaccctctataagctacgttttccaaagcccagtatccatttacacattcatcaaatcggggtttcactggcctttcaatgccttctagggattctgtaagaaccaaatgaatgattatgtatctaagctcttaaaactgtgccttgcacatagtgaagtctcaaaaagatgctataagcttttataatttctacttgaatttctctgtagctctcaaaggtaggcattaatattttacacaggaacagctgaggtttacagagaaaattcacttacctaaatgcatacctaacaggtaacaagattaggaaatcaaacccatgccagaggaaagacatacatcctccttgtatcatgtgggtagtgtgttccttcaaaaattttagtcatcctatcagtacaaccatcaatattcgagaagagggagaggttgtataaatattattttcactgcaacacaaattgatgctatatccttttgcttggcttagaataatgttggcttccacccaaaaataccccaaggactgtcatctttgactagattatacaggtgaagattaacaaagcaaaacatcacttcattgctgtatgtccacttaaagtagaattatatgttttaggtgtttaatttttcattagtgctcccaacaaattccaccagtaattacaggccctgacttacagcggagtcggcattgagtgttctaattttgttgtgagatctgtaatgcagatgtagcaaactggacagatgtgctctgactgtcagttttttagtattcagtagactttcccctgaagtttagattggggattcctgtataatcactaggaaaaacaatgtctcaagcaagagagatgttatatagactctaagatcccaaacaactgtaaaaccttattactcagagtcacctttacctctgttggtacagtaaaactcagttactcactgctaccattttggttgtgggatagatgtttggtgctccaaaaacaatcattgaaggggttttgaagctggcaaagtgtttgcctcaaaagcataagggcctgagttttagcccaccaaattctattattaaatctaagcctggtggcacgtccatgtgtttgagatgcagggacaggcagtctctctgagactcatgggtcagcaagcttagcctatgtgaggattctaggctagtaagagaccctgtgacaagaaataaaagtgaattgtatttgacaataccacccacaagactctgagacttttctgtagcctcatgcaaatgtaaacactcacatgacacacaggaacactcagacatacacatacacatgtacaaaataacaatagccattaaagcattgattctcaccatcttatatttcaagcctagacaattttgttttaaattatctaaccctgtgtaatcagctccttccaacattatatttttaagcttgccatatctaacaatgggctcgcagaactctgggaccagctaaaataagttaactgtgcccagttagtcaagtgaaaaatgctcaatagttttatttaaatgcaagaggccaggttagtctcagtagacaagctctttgttaccatgaatcttctatgattgttcagtgctcaatgagagcccagaaaataatgtgtgctatggtagaaactgggcactcagctgaaataagtccagatgttatgagattttatctcaagagttactaatagctaaaaataataaaatagaagacaagattgcctagagctacctctctaagttttaaaactatatattgcttagaaattgcctctgggtggagacagtagacgggactcacagagggaggtgagggctcttcaggtgacctaaatctgtagcagttcatttccaaatcagtaatgtatctccagttgctgatcataatactccagtttttaaatatccatattttatggtttattaatataaaagaaaaatgtatagttatcttagtaatttttgtttcacatggggcccatcggaagcctatttcaccaagctatgtgtattataatttattgcatttgagttattatctatagcatgcaaatgctcttcataccctgaatccaaatctctgatgacaggaatcatggcagagttcttcagtgccacagttagatgttgtccagatttataatctgcgctctcatttatttttataaatacacttttgaatctggccctaaatgacctgacttgactcttaaccctgtattcatcttggattattcagttccttccagaggtccctctttatcttttataccagaaccattaataaagtaatccccaagactcaaaaagctgctggtaaaggtaaggatttgaggactgagcctggtgcaagagggaatatggataatgaattatagccctgtcaagctgttgagccacagatatgtagaaaccaagggatgtcctccctaatgactaaaagcatatgaggtttttgagactctgatgagcctcacaccaaatacagtgaaatatccacaccccacctccttgtgaatcatgtcagttctgggaaagggtgtttttgaaatttaaccctatgccaatataatatttcaactttagagggaaaagacaaacagtgatttgaaatcttgtgttccatcaatatagaaataatgtacttggttcccaatacagaagttgccatttctttggtctgatgtattttcttgcaataggattttctccctcctaatgttatagaaaaggcaaacatggggttctttaagaagttgaccttgccttaaatggctaaggaaaataaacaacattgagtaaacaaccaaatactcttttacttcataataaaatccatttatcctaatgttcacattcagatctctcactctgggtttatatatctgttccatggaaaagaaatggcttctaatgctatctatcctactgctctgaaaaaatggcccaagaggggcttttatttgtgtttcaaatcatctgttggttgtaaatggtataaattccaaaatgcaatcattttctagcattacaattttgatgttactgttcagtcatgaaaagcatagatgtgattctaaactcagatccaccatcaactggccatagacgaatcttattcttaaagaagacactcaaagcacaggcctttagagaattctgggaggcctagtgaccttggaaatcagatattttcttttatagtacaatctccctcttccaacaaatgtgtgtgcacatctgtgtgtgtgtgtacacacacacatacacacatatagatacacagagacagagaaagagagggagaaacattttgtaatccagggtacagtgaggggactgtttccagttctgcacagctctcatttggaattgatgctgacaattgcctcagcatccgagttaccccattcctgcctcgaagggaaagaaacattttgcctctcctgtccacctccttggcattcaccctttaagcccagccttggaagtaaatggcccagtcgtggaatgctgagaagctgtagaaggactgtagttcatactgagttcctttcccagtaagtatctatggagaccctactttataacagtcattgctagtctctgggctagagtgcaaggaaggtcagccaagaaatactcttagtttcacatctgttcctccaacgaccaagtgaacaaagaaatcactgcagatgtaacaaggtgttatgaaatggaataacacatagggaaaaaagtaggagccttgaggatgcttgatttgcagagacaggaagggcctcttaaagaaaggacctatagtagaaaattatagattggataatgacagaacccaaacctgagtgttgaagaacattctggactaagaaaatagcagtcagagcgaagttatcacattttagaagatgaacacaaggtatcaagaagccttgtgcattgttggaagtaaggaattttaattctcttcaaagtgtattatttgatggttcagatactatgaggacaaaagatatttgcaaggcacctactatagatcatcttatctagattcacatttaaatatctaagtgtagtattctagaatttgaataattattatcctgtgtttattatggacttgatggttttcactagcatttttccctatgcatattctatggttagcatacaaggagttaaaaattggttgaatttttttttcttttgttttagtgccaggtgcactttcactttatataatccaaaagttagcaaagttcttttgttaaaggccagatagtaaactttttagactctgagtgccagatgcagtctgttacaaaaatacagttttgcttttgtaacacaaaagccatcacagaatatatgaaaatacattttcacaacggacctggatgtgttagaataaaatgttatttataaaaggattagctgtctaaatttgtacgcataatttataggcttaccaggtttgagagaccatcttctggtcatcacagagacttctaggcattaggtataggagtggatattctcatcatgactgtcaagaaaagagctgattcagagagcagctggcagtcatcctacagtgagtggaatggcggaaatagactaaagctccagtcttggtgacattatctcatccttagccagtcctgaggcctttcctaaacataagcattttcagttaggtgatctcaccaagttctctgctgttaaagctaggcagagttgactcttacccgtatcaagagaagacatgctcaactagaccatctgctctaaaataatcaattattgttagttcttaacatgcttaactggcagtttgcgtaaacaatttctaaagtgcttgtgcatctctatagtgctcatcagatgccaagggggatctttgagcagaagtctgcaaatcaatggccctagaagaacttaacttgcaatgggttccctctggtgcatgaccacacggtaattccattaactttaatgatggttcgcctgcacaaaatggactctgttagtctattctcctctctgttttgggcattaaatcttctcctccagctaactcttcagggtgaagtatggacagctatgccatttatttcttggcctttattaatatatgcaggcctctccctctctgggaggcagccctaaatgagtgcattaaaaatgaatttcctatgccatttgtcgatgctgagaaaaccccagagtcaggcacatcagtggattattatggattgttgcaagatacaataaaaccataaatattactcaaaacaattactgtggtcacattagcaaattatcaaatccataattttctctggaggctggccttggagagttaaataaagtagcagggggaggaaagttgtattttaggaatgagagaaagagagctaggagagagaaatttatgatttaatttgctgggtgatctaaatgagaataactattgaatttctaaaaagtgaactttgattagtttcaggtgtcagaaaagaacagaaaataatggatcagcttatggtttttggagagtctttgggcggggggtgggggggcaagaagatattcattgtgaagaataaggcataacttgacctttgacccatttccttctgtgttcttattgtctgtgttcagataattggattatcctgagactagctggcgcttccctagacttggactttactttctgcaccaagtgtcaatttacccccattcagaaataaatcaattgaaaatgaaattacccacagcactcgtttttcaccatctagtaaatgagtctctaaagaacaggagggcctcccatcttggctcaagcttaatgaagtccttctttttggcagagctggtacagaactattgtctctgccttagtcatgcttcttctctttactggattatgaggcaatatctgtttggtggaacttatagtagcatgttcctagaggcttatgaatattttctgaagatataactggaggcccagctccttacgtatggcagcctagagtaaagctacctattgctctgtcttcccagttagcaattatggaagttcaccagcagttctggccccaactgccctctgatgacagacacagccacaccagtggctagggtttcaggaatggatctgctcttcaatcatcacacttcaggaagacagcaaagcaatttacacaaagatgaaggagatctcctaatgaaccatatggaagattttaaagttgaatacattatgaacaacagaaatggttttaaagtagccatcacagaagaaccatgttctgtcaagtctccagagccttgtaaagagagggaatggcagacgaattcagtagatgaatgggaattttaattgcaacctaattgattttactcagtatgctcattaggtgaaaggagactccaagtcatttcccatggtcattgcattaatagatgtgagatgtgtgtgatctgtagcattgctttctccctgtaaacagcataagcaacacaagcagagctttacaaggttgggcagtgatgaaatttgtttctttgtattttagctcttgtattaactcgtcttctatatgcttcgtagtcttagctttaatgcatccagtgtaccaacctatgtccaattttatcaccaatttttctgaccacctgtcttattccatgataaaataatcttagttagaaaagttattcccccccaaacaaaatcccctgttcttctacggtaactccccaatatctctacaaagacaaatttccaattacattgatacaattcaggtcttattttcaaatgtgtgcaattattatacaacaatgtggaacaatagtcagttccctcatttctatttctgtcttcttttcaagttccagcaatagcatccataagtccaggtgatgtcagggtccctgctcttactcccatctctctcttttccttattactctctcccttccctttcctcttccttttctttctttcctttttccctctatccctcttcctttcttcctattccttgtctctgacatattcattctttcttcctcttctaaacattttggacatgctatattgacattatcctactgttcattgctagaggctttgtagactctggaaaaagatgtatctccccccaagccctggacacaagatttgtcagtgacttactatgtacatgggatggcttttgctctttcactaaactggtcccacatctagtgctttctatgcagagtctactgcagtttaaactcactgcattcgatcacatgtggatgttcagatacatggctgaccataaacaactgctggacttcagagctgattatttttatagaagataaagttactaaaaaggttgcatttgcatctttgtcatagtttagaccttacatagaggactctttctgttttctgaagacagtcaagtctggttattactactaaaattctgtggtgtcatcatcatcaggaaaacactgttaggagatgaggtggattctaactgagtacatattccattaatgtaatgcattctgaactaatattcttgctcagtggtgcttgatctataatagtgttgctttcaataactgaggtgcctccattgcatggctattctcaggttttacactttccaaccatttatctaggtgttccccttctaactggcatacataggccatgtggagccccttgaactcttgggtgatgacaattataatcataaattcaattacaattggctaactcatttatctctgtggattgaaaggctttcaacgtacttaaaatatttaaagttatgaaaattttctacaggagaattcacctatatatagcattaatttcagtgttttccagatcattcaggtctaggtaaccatgaattattagactcagtttacatgatttagaacctttcaattcagtacttaggaaaagatagcatttcttcccacgatacaaggaaccgtattctaccaagagagattagatgttgcaaaagtcttcttgactcataatattgcagtttcaaaatcagacaccttcactcttcttatctgtgtggttaggattaaatggcttttacttttctttgctttcatgtctataaaaccagaatagcattactccttctagatgggaattttgtagtaagtgagattatgggaggtctttgtataatgtttgacatattatgcgttattccccaattacttatggagaaacccattgcatgctagtttatattccagctcctatgaccagagcaatgagcagaaccactggtgaggaatgaaagtggatttactttgttttcagtatcttcttaatggggccgaaaatgcttattaatgctaagcaggttgctttccaaggaatcaaggcaagtgaatcaggttgaatggtttgtatagaaatgatttgatattgcaagcagttaccagattccctgggagccttttggtaggtatgagggtgttctcgacagatacataagttgtctgtaaaactttggcccattgaattttggttccatcgaatatactttttttctgtgagattacaaaatgtattctttaaaaagtgattaagaaatatgaactaaccactcccagagctcgtgcctctagctgcatatgtagcagatgatggcctggtcggccatcactgggaagagaggccccttggtattgcaaactttatatgccccagtacaggggattgccagggccaagaagtgggagtgggtggttagggaattagggtgggtggagggtatagggaactttcgggatagcattagaaatgtatataaagaaactatctaataataaaataaaataaaataaaataaaataaaaagtgattaagaaactatcccatactccagtggaaacagaatatgagtctgaggttaaattttcattatagaaaataatgacactcttaacctctgatgagcaaataacatggtaaagctgactaccaagtcacaggaatccatagcagatgaagattaagttagctcgctctctctctctttcttttgatcgttgcctcttcaaaatgctgtttaagttagaattaaaagccttaaattctagaattaagccttgaatttgagagctggcacatgtctagtaaagagagttaatcttacattagattcaagcaagctttattaaagatttagttaggactgaattttgaagttttgatagagccccctgatgccccctccccatgctcacactaaattctctctgtcacttctggtagcagctgttgactctagttatcctgggtgtgactgtcagaaggcaagggcaggaagtggaatattcaaagctgagctgtttccaagctttgtctgaggagcaggttttacagccaagttggaaattagtgagaagaatgctctcccacctccttccttcccaagtgcatcactccccacagtcagctcctccgcctgacccatgagaacatgtgtttggcatacgctgtcatccgttgtggagcccaggcttccagaacacaacagaaaacaggtgtggtgtcaaagcaatttagtgagtagacaagtggaactcagggcttagaaaagaatgtgtcatgtcccaaactttatcatctttggcccttgatgcctagatccaaaggaccatgtcttaacagcagccagaccatggtaaccagtttaggatctaggtttaatgccacttgctttaaaaaaaaagacacatggactctgggttagacagcaatgagttttgtggcatgaattccttctttagtctctgctagacatactgatggttttcagtcactacacacatcagtgagacagccaccaatgcagacatatattcttacctgtggcctagcacaggtgttatatggttagagcagcaagaagagtctgtctctgttgttagatgatatttagagttttcagaatttaactccaaagaagagtgagttccttgctagaaatgttgctgttgtaacttaccgtgtgatgatgtgatgtaaaatgtaattgttcctctagtagtatgttattagtacagtaatctgtccttgttttacacaatgtgttcccagatcccagctggatgcctggcaacacatatagtaccattcccagtaaaagtatgcctgtcctacccatatatacctgtgagaaattttatgttatgcattgtaagagatttaacaagagtagtaaagtaggagagatataactatatcaaaattgccacttataactaatgaactgtttctggaattcttcatttaatattttcatatcacatcaaccattagtaactgaacccaaggagtgtaaacttgcaagtcagtaggagctactatattgctgtattagacatgtatgtgcatgaattttgactgatcaggctgttagtaatttaatctttcaagggatacacagagtggctctttgtatttactttacaaccaccttataacttacaggtcaccaagctcctatctcccatggttttacttgctgctgtggtgccgaagaacacagggagtcaggctttggaaataaaatttaaagaatcaaatattgtctttcccctttgctagatatgaacacaatttgcttgtccatacaatgaggatgttaatagtgcctgacttggagagttcttataaggatcataaaaatcaagaatgcttagggcttcacttggtaacttggggaatctttttgtccattgattaggaatacatgagcattattatccctgatgttgtatgaagtaggtatgattctaggatatttagctacctaattttattttattctgagacaggattgtatgtagctaaggcaggttacaaacttgctgtatatgcaaggatgacactaaaactcctcaacctctcacaccacctcgccgagttataattagagataaacgccgccatgcccttactctcctgctaggcaagcaccttgcgtcccttccatccccagctcttactcttactttaaagcttaagagtgaggtaaccagcattccaaagggaatcctgatttgctcattgactacaatttcatcagaggcaaaattaaatagcaaactaggcccatgatactttactcaaggaaatattggtgaacagggtggtttcagcaacctcggcctcatcagcatttggctaaaaagttcagctcaaagcaaaaacattcaacatgtggcatttactctgttggcagaggatggtggaggctggatgtgtactgtagcgagaaggcatgtcttctagaagttttaagacttcagaaagtaaaagaacaacatttgaagtgtcataaatttctgtaggttaaaatctctactataattttttaaaaagttcatggtaacatttcattttcctcagaatattaaatatcattacattaatataaccacaaataactacttatttattgtaaaaaaatctagattattaatctatatgagtatgcagagaacatttctgagcattgctgattgtctgttttgtcagtgactgttagtagacacagatggagaagtcaggtaatggcagtcatagttttagagttttcagttctgtggtgagggtcaaaagtaatggaaaagcaggagtacgatctaacatgtcctaaaaccaaactgaggctgaaagggacaagcaagaggtgtgggcttgagtggttaaagcatttcccagtttttcagaagtttttcttccccagggaagtagttttgtaagaaaaggagaaaatatagtcatgagggaagcatgagcaacaggacgccacacaagattttcagtgcttcacaaatcagtgttttattattgagggatccttcatgggtagcgtcattgaatccagtctttgaagaggctggccagtggctttagttcagttggtgagggctggctgcaactcagcagggtacccagaagccaagatcagtcctgtcttcctggttgtagactgaatcttttgttgctgatataataaagtggggacagtaggttttacattctctgtctctctgtctctgtctctgtctctgtctctgtctctttctctctctctctctctctctctctctctctctctctctctctctctctttctctctctctctcttcattgtcagtggtggctatggtatagatgacagccgcttcctctgtctttgtctcactaatattgagcctcttagcaaagcatcatgagtttaagaattcagtaagcaggagacaatatcatctatggtgttcaactttcttaatgctaagactcttaaatatatttcctcatgttgtagtgacctccagccataaaattgttttctttgctacttcataagtataattttgctactgtgatggatcataatgtaaatatttttagaaatagaagtttgtcaaaggggccatggcccacaaattgagaactactctctctgagaaaactcattcttattttaaaggaattaaggactctgagtttgaggatgaaactttttttttcatctcgtgtatgggtatttgattatttggcctaacttctgggacaagtgctttggggcagatcctgaaaaatcctcattctgtgttgatattctcttctaaaagacactagcaggaaaatggcttggcacaatgtggactgtccctctccatagatccaactcagctgtcctacaatttaattttagcactagtatttctccaaagttggtgctcctattcatttgaaaagcttaaatgtgaaagaaattcttcgatgagcaacaccaggaagatggaatataattcaggacattttttttcccttttgcttcagttgcagtttcttctccctcatgccctttttcttacatctatctatcagttgcaagtgacagaaaacccaaactggctgaataaatggaaatgtattggatcacataattaaagtgtccaaggaaatcacctgccctcggatgtatcttgatcaagagactcaggactcagcaccttctttactgcctctgcattcatctttccctgccaaagcacaggcatgaactcaggcatgaaactggcatttattgaggtgtgtattttcaggccattgaaggaataccctgggagatgattgtagaacccttgcaactcttctctctcacttcttattcatgaagccagcagctttgaggcattgacttctagtcatctgagaccctgatgcaactgctagtggatggaaagttctagaagtgtaaagtcagataaaccttttctctttttaagctcattatctctggtatttgtgagatagaaccataatgaccacagcttccatcatatctctgttctcaaggtagaatgcaaatcaggtgaaatgttacagaagagctaaatatagcatcccatttgctaaaggtttgctgcaaaacctgatagaacatagtatctattgatatcacttacgtaggagaactgtctttctgctatgtgagaaagctgttagatcagctcaaggataggtatgaagccactgtggtcagtaaagcccctccattattccccccaagtgaccatagataacaccagcttagcactttgcacacaccattccatctgctttctgctggtgtagattactattaattatcatttcacagagtattagccaagagttatcatgatgcaataatgatatgaagccacaaagataaaatgctctaattaggcaggaaagttgaggggtaagcagttttagagtgggcttaacttcctcatatgcttgcatgtaatttgaaacactgagtgcttatttaccatacttcctctaagtgtattttaagatctcacatttattcctttaattgcagactttaatgaactacaaactaatgtaaattctataggaaatagaattgtaatccactgtagttctctctctctctctctctctttctctctctctctctctcacacacacacacacacacacacacacacacacacacacacacacatttcctgaaagcagacagatagagatctcatttgggagacttttactcttttgcttctggctccaaagatggccttgttcaccaaagatatggggaaaatgcagaaaaatcaatgtaaaaaaaatacaattacttatggttaaatttacatatttgctgatgacatttagaaaattaccatgaaaacaagctttcataagaaacccctcaaagcttgatctaagacaaaagccctctccattatacctaactgcagattctgaaaatagactgatctaaatatgcttataccatttattcatgcttaacaattgaaaattactgccagcctaggtgggagaatatttaagttgcttttgcttttaggactttgatcccgtttcttcccacagtagggtttactcaacacattccattcttccattttgaaatgacatcctccctattctacttacttaactgttctttacagaagtaactctgtgacccttttctcccaaggttcttcgaaatccttttgtacataggcagttatttgagcaaaattcaccttcttcagtactggtgtgatagctcaatgtgtaaagcacttgctttgcatttggagacctttatgaatctctagatgccatgaaaagctgaacatgttaattgcctatcacccagtgttgttttggtgtaatgggagtcatgagaatctccagaagtttgtaggctatattgttctcagcagcaagcaacatacagacctagtctcacacaaggtaggaggcagtaaaggctgacacctgatgctgttccctgacgtctacatgaccagacataaacatgcttcatgaacacacatgcttcatatatacatacaaatacacaaattaatcttccccagtagattgtctgtgtctctactgctcatttgagggtatttgatacattgagtatgcaacaaaacaggacaaaataatacccaaataaataaatcataaatttgtgtgtgtgtgagagagagagagtgcatgagcacgtgtgcatgcacatgcatgtgtaccagtggctagctggctagctgaaggtgatgaggccagaatgttattatgatatttgaatatagttttatttctcattttaaaaatatcacaatttcatattttggtttatttgatcattctatatacgaatcaacaaaggattctttcatagcttaagggattaaaagtaccaaaggatagataagtaggatagtaattcatgaatcttcttaaatttttaatcctacttttaaaaggtaaagtcagatatgttctcaagctgtttctgcatttttaacgaagataactttggaatattcagcctggaaggtggctgcaggatctcttattagggatcggaggccagctggtaagttcttagtctctgtcttttccagatttctagtagccagagccttacaatttttactcaaaaagcacatatgcattgcctctaaacctcccaaatgtgtgaaataattacccaggagacaaaagaggaggacccctatggtcaaatacccactttgggtctgcatgaggtataattctgtgagggtcagattgtgacttgtccccctttcaaaatattttaagttgcattattaaaatgcaccataaggtgcctttgtgtagaaaattttaaaaaaatagaacttgagatggcccagacatctctagcaccccaaattttgcattttccttgaaatgtccctgtgctttgaagattataagtaggccatggagagaaaagcctgatgtgaatttcttctaatagccccacactcttctttcaaatgactacaaaagcaattcagcaaattttttgtaccagattgatgaaacaaaaaaagtgcatattaagctttcctgattaattaaaggcaccaaagaaagagtcatctcggctcgagtttatgaaaacaaataatgcttggagatgagctggcagagaaaagctggactctgctgtgagttaactcagtctatgttcacactaagtattattgcacagtgaaaaatgtaaaaaatagctaattaccaggggtctcaaaaggcaggggagtcagaagatacacactgtggtttcaagactacaaaataagcaattaaatctaatacgtcatctctggccctgattcttcaccttcttcaaagccagtgtaatttatatttataccatgtgaatgatgattgaggccaccacataaagtagctggcatgatgaaagtcttccaggtttcaggggggaaagtagaaacatctactggagtacttcttcatgcccattgtcccctggtctctggggagacctagccactgctttctgggtgatacaacccaggaatttattctttaaaatctctattgtagatgggagagaaaggtcaagagttgtagagaaggtgctgctgccaaaactgtaatctttccttgtttgaaaacttcctttcatatagaaggtattctagaatgtgaccaggacaactgattgctgctaattttgttccatgtgtgttgcctacagtaatgctagtaaaaatatgcatgactggccttattcttgtgggaaggctgattctgaggtttcccaagatattatcagtgactataaatcaaatactcaatttgccatatttttattagcattaccctaggcaaaacacagggaacaaagagaaatatacatttcaatttcttccctcttctttccctttatccttgtctagctcttcttcacctccatccttgctctctcctctcttctcctctccatccctcttgatttgtctccctggttcatggttggtgtgacaataagggggcaagactacatacatttatcatagatatcaagtgcactttattttagttctaaccatggagaactgcgaattgaaatattttaagtctagaatctagacacacttggagagtaatctgggggtcaatcaacaatgcctttttttttctactgagacacagactttaataagattttcacatgtaatcaagcatagtttccattgcatctgagcagcaaccagaaatggcagcttgtcgttttgtgacaaccgacactgtggcttttcaattctggtttgcagaaaccttatcgtccattaaatctaggcatgctctgaaaaaggctttaggtcactccaagcttggcaactaacatttggcatggacactggtaaaaccacaatagagaagtaacagatacaacctcataggccataaacatacacagcaaaggaagcaggagtgagtcaggagtgaccacagttaacagaggggcttagcagagccactgggaagctttgactcacagccccgacagttcttagagtgggaacgatatctacatacagaacagctcaggcactaacacactgagaacagaaactgcctgatcagctcagtcgtagtaacgcctcacagccttcggagttatcaacaatatcttagtataaaaaaaaaaaaatcaagcaacaacgccttttaagggtatacaccacatttcttctcttaaattgacttcttccaatttcaaagatattttattttctgggtacttaagtcctaacttagagacctcatagcttagtgatccttattccttgagatgggaaatgccattgacagacatatccataacagatggtgtactgtttagctaactacaaactatgggaattcaaataagcataacaaatgctatatctgctcataatgggtagttttcacaatagttatacctaagtcttttctcaagttgtatggtttatttttttatgtgagtgcaaaagtttatttaaagcaacatataagacacagattttacagataaccctctgtgactacagctttgaaaagcagcccatttatatgaccaatgtagataacatggaattctgtccagtttggaaggcagagcactctgtgtttgaaatggagatcatctggtctctgctgggcacatttgaagtcactgatgccagttcagtccccatgtgggtgaattaatgtagtccttttcatgtcttcaagcttgatccaccactcagctgtcagagtgcgaacaagtaagtctgcagtgcctctgggcacattcaccgcagggaagatgtccccaaagaatgttataagtggcattcaacctacttgtccatgagagaaactactatcacacatctgattattctgttaatgactctagtatgtcgggtcagagactttaatgttgatgactccggtctaactcttaaaattaagggacttctttgaagctgaaactgtgaactagtttataatgtagcacctacaataatcagcttctacctagtccagttatgttaggcactaaataagaagaccatattctcagttccatcccttcctgtactcccaacacctagaaaaatacgtataataggagctaggtgagcacttgattaacaagtgaatgtgtgctttggtaaatggcagtcgatggtgtcagacgtggctctgagctttggctacatcctatgggactcatgttcatgaacttgctcaggctattatataacaggagccttctctgcatactagggctttcgctcactggtgcaaaaagcagacctaaagtgctgtactatagaagctgcctttagccaatggcacatggaatgtggagatgaagttcccactgtttcttcctgtaagtgaggaaaatctgaaatgtgtattctatgcagtctcccagaggccctcactggggtcttcagttactctaaaaagtaacctaaacacagacatctcacagtagctttcttcttctctcctgtattatttctcttcccctcctaacgatacttcctggaaccatttctcaggcaattcatttgaactcatattcacattgtagggtctgctatgggagaatccactctaaaaggcactcatagtaaagtaagaaggaaccagaagagtctctggtatttctgcagttacaactgaaaaatcaatgtcttgtagtccttacagctactgatgcatgcggtcttgttgtatgggctgagtatgtggttaaagagtaggatgcttgcttaacattctcaaggctctgagttcaattcccagtaccataaagacacatacccatcctacttataatggttaattaagaagaacatgctactttttaagagataaagaactattcatactaaatgtcaaatagtctaaaattttcatatggtacagattcaattgaacataatacataaactgaatctttgaccttctatctcagtatgtggtggctctgttgacatcaatctacccagcatcctttccttgctaggcaatcattgttatgatagtaagtcaatcttctttggctcctagggtgatacagccaagtcttttggagggtagagggctcttctgactcaaatggatcttctgtggttctctctcaatcatcagtgatcacgaggttgggacactctgagactatctccccaagttagattttttatctttagtgtgggagaactaagccccagacagcctgtccctgtactgttgatcttttctgaggtgtgtttataagaaacaataaatgtagtcttctttctgtgaataaataatacgttaaaaacttcatattttattcttcttccttatagactataacttactaatatgaaactctggatttggtaataatattagcgatatccagaagccattgaagtatgaaaaaatcagtcataagatactggggccatggctattgtcctagtgtgaccctgtgccttcctgtttgtagtgttaccaagtagccaggagaccttttggaatcctttttatatgatttttaatttaaaaaatgtattattggtatatatgtgatatgtatatagggatacacacacatatgtgccatggcatacatgtgaaagccagagaacagtattatagagttggttctcttcttttacctttacaagggttagagggatggcattattcaagagtctgactttcaaagcctttgcccactgaaccatgtcactagcctggatatgtgatcaggcatagggactttcccatagggactcagccatagggacttaccgtagcatcttccaatgctttaagaacttgtctactctggaggtaaaacacagcatcccagaagcagacagtaagagcaagtattcactctgaagcaattccaatggtattgtattgaggtattggcatgctcttcattttggctaagttggttgcgcctaccaaagtaccaaaggtcttgatcccatccccccatatatggtcagggaacagcaaaaaacaatgtttctatattttcactcaatatgtcaatctcaaatatatactacaggcccttttcttggttctacaaagctacaaattacacttcgaaattttcatttttttttttaactttcctttatttagcccttgatgttgagggaacttatttagtctttgcttaaacattctaataggatttatgtcacatcaactttgttctcttctatcttgtactatttattcagctaatgcaatgtaaagcgctttgtttggatagatcatttatctccctgtgctagcaccagagagaagaatgcccagtggtactcagcagtcatagaataccttctcaaaaagatgtgaggtcaactaagttttaatcccaaatcaatagtgggcttttttgctgaccctagcaagaatgtaaactaatagataccttgaattctgtggaggtgttattgctccctttataaaatataatttaaaattaaccacatcaggcttttacgtgagttctggaaaatnnnnnnnnnnnnnnnnnnnnaggtctttgagttcatataaagttaatttcatatatttgggccatttcacattaaataccttgttgtttaatatcattattcagtcatttatcagaccagaaactgcacaagaacaattcattatctagggcatctctttgccataatgtgtagatttttcgatttgttctttactctggaacagaggaaatgtgggccaggtgtcaggtactggcatgttatctataggttaggtaatttagctggacactgccactgtgggagtctgagtgtaatgaaaggatttttcaagtccacaccaatggcctacttatttgtagcacaaaatcagagagcacagtccaaggacgtcgggagaatttggatataaaatcttgcacagtgtaggtggcccattctcatgaggccgtttgccttctgttggaatggcaagggaatcacatagagtcaggaataacctagcacctaaaaagaacacttaaaatgagaaatgttaagtcctcttatctcagtgacagtggtactttgttcatatatggaaattttaatctggaatgattaaatttaaaataaatccatctggatttaggaatcaaatctaaagaatagtatcctgctaaactccactccgtgaaatattctgaggattttcattcagttacagtgaagaaattatcattgttttacataactaaacaatttcaaattaatttaaccatagaattattggttttggtggtggtggtgatggtatctttttttctcctgtacctgcttatatagagcagtggaaagtctaaagatttgtcaaaggtatataggtcctataactactaagattttcaagagaaaatattgttacttgcaagcttggaagaatttcaggttcatgttaatgtactcagttttagtgcatactagaaattcaggaaaacagtgtctttatttattcagctgctataatataaaataatgaaaaagtaggtggtttatagattacagatttattgctcatagttttgaaagaagaagagtccaagatcacggcatcttggtgttggtatcaatcagcttagggtccactcctgctgtgtgaagcttctcacatcctcacacggaggaccatgagaaagtgatggcaggaatgctgagcttctggggcagcaggcttctctctgcctccaggtacctacttttgtaggagttgaagcatctgtcagtctttcagttaatttccctggcctgaagagaggtttcctcacagagtaattggggaattagcactcaggaaactgactgcattcaggacagttattgatagagctgaactatggagttcatccagtgatctgggtttggttcttttagactgtgtcaaacagagagagagagagagagagagagagagagacagagacagagacagagacagagacagagacagacagagacagacagagagagacagagagagacagggacagagagaggagagagagagtgagcatacaatgtgagcataagtagtataataaaatcttatttcacttgagaaagagcactgatggaagattccgattcattacattagggagaagactcaacacaatggattccccatttggcagagtattaagtcttctccctggaacagtgttgctagctgaccttaatgtgtcaagaagggctgagaagagctatcatgccatcttgcagagtttcctgaaccttctagttgctgctattgttactctcagtgtgggatgaaggcagtggtcctttcactcatttctttcatgctgagaattcctactcttgtcaactgggttcattcacttatgtgtagagtaacccactggttccctggttgtcctttataggagcacacagcagtttcatcatgtctgagtctagctagggctttagtgtggctcattgacctagaagattctatgagactgcaaaatccagctgagttttactatttacaaaggattttgctatccataaaatataaaatgatatcagaggattaaaaagtcttttattcccataactggtattttataaaatgttttctcctttctcatgactacagtgtagtttataagatcttcaccacaaatgtttcccactaaatatcctgtatgcctcaaatcttagaaacaggaacacatcaaaatatgtgattaaaatgcaatgtggaaaatgctaacctataaaatgtatttctaactatatctcaattgtgttgtctatctatgaatctgaaatattctaaaatgaacctaagggtgtttcgggtctacaagcaaagttccagatttttcttgattttcatagaagtgattttgaggtctgtgggcatcctgggcttgaggcatcccagagccagtatgataattttagtcacccacattaaacagttgtcacatgttcagtgggaaaacaaagtattatcagaaaaaaatcagcacacagattatcacacattgtgggttggatgcacctgtcttctgagtcctgctctctggcagcaactgtcatagagtcttctaggccaatgagccacactgaagccctacatgcctcagacatggtggaacttctgtgtgctcctataaaggacaaccaaggaaccagtgggttactctacacataagtgagtgaacccaggtgacaagagtaggaattctcagcatgaaacaaatgagtgaaagaacctctgccttcatcccacactgagagtaacaacaacagcaggaatattcagttacctgtcagagttatgctctagtctcactacccctccccctcttagttaggaaaggactgttccttgcaggaacaaagctccagcaaatgtaatctggactgtagtatggaggcaatctcacaaattctaggccacactctgagtttcaaccttctttatgtcacatgttcttttgacatgcttggaacctcctcccctgagagtaatttacagtttcctaatggaacattttaaagattttagaaggtaggaagtttctacctttcccattgtccttccccatcaaggcacagtttctaagtttctacttagatgctagctctgtttcctcagataagcaaccagtaggaatgtgaaaagatggataagttgactgcccatccaactattgcaatctgtaatgttgatagtaaagctttcaatgatgtcttaaatattcagatcatggatgtagctaattatccatgactgttttggaagccctaagtaaaaaattatattatatgtctctctctctctccatatatatatatataatttatatgtatatatacatatgaaatttctacatatacacatatgtttatgtatttgaactgttacatttttctgaaatagaaaataaaacaaaaagaatctaacatggatataaatatatacatgtatgtatatatctatgcatatattttttaaaatcttttattcccatagctagtgttttgcaaaagtttctcctttcccacaactactatgaaattgataagatttccattgtaaatgtttttatgatatatgtatatatatagagagagagagagaaagagagagagagagagagagagagagagatacatacacacacacacacacacgcatgcaaatatatatacatacatatagatacatatgtatatctttacatacaagttagatactttgtgctttattttctttttcaagaagaaatgaagcagatcaaattttaaactaagtcctagttggtactttaggagccctggcagcagagcattaatgacaggagttcaatattcctggtctacaaatgcacagcttataaaaccaagcaggttttaggggttgagtctagcttgaatgttattagccatgtaactagattaagtcacttaggctgtttggagggctctgctcctacaactataaatttggattaatggtaatcataaggattctcagagatcatatctgaaaacacacagaggatacctggcacacggtaaacattaacgacatatatgtactaatgtggtattctttcaggatgctagtctaaacttgcacttccataattgtcttctctctaagaacatgaaacatcatcacccacttctgaatattctaatgatcattttctttcatttgacctggtatatttatcaattaatacctgaggtgactacaactatcagaaacgtggcctacaaatgtccttggttttatttggcatttttaaacatccttgtaatttggggttgaagataaatatttataagtgtacttaagcaaggtatgagagattctactttgtttttcatttgctaagcaggatgggggaagggagcactatcatagtccatgtcttagttgttaggttagaaatgctggatatggtggtgcttgggaggcagagacaggaccatctttagggtttactgttgctaatacagacttgctggtcaactccaggctgatgagtggctaagaacatggactacttgataaaaattgacagacacggttgtcctttgaactccacacactagtgctcacatgtgcccactcattcatgcacacacatgcacatgcatacacaagaacttttaacttatacagtgatagtatctctggtgaggttggcaaaatacaaaatgaaatgcttaccttaaacacagagaaacgcccatcgctgccgttgtgtataataatccctttcatgtgtaaaagctggcttgagtactttcagtttcaacttgctatattgcctagctcagacaagcctgcaggcatgtatatgggaaattttcttggttgctaagtggtgtaaaagagcccagcctactgaggaaggtgatgctcttgggcatgcaagccagaagtatcaagtcttggatgcatactccttcatggtgttttcttcggttactgcctccagcttgctgcctttatttccctcagtgtctcagtggtagaatgtggcctgagagtgtgagcctcttaaaccctcccacaatattgatgaggatgatgtgggtttatcattatcattagtattacttatttttgttattactctgacagttacaagaagcaaaccagagagaggctggaatctgtttcattgttatttgctatagctgtggtctgcagtgggttcttcctctggggttatatatcgtggcgtggaagactgactttattttaaataggtgcttctgaaatgtctgtgttttcattaaatgtaaagtcaagtgtcacaaaggaacataaatcattgacttctgaacaagtagagccccttgccctaacatgtggcttgacagagtcactgacagaagaaacggctgacttgaagtctgagaagagtgttttctagtagccaaatgtggactatcatgaggcacatggtgtagaaaaacatcttatcttacgcaggactcagttatgctgtcttttaaacaaaaggattaaaaatactgtagatccttattattggaagaagctgcatcggaatgttaaagatgaatctcactcccaggcaatcacaccagactctcatgagtcctcctgcaccggtctgtgcactcagacacacgctggctggagatagcacttcaatgaagagctcctccaataccaagtacctttaagtcatgtctagcctcaacagtcctgactacctcttgatatcttatcttgactggttaacctgttagggtcaggacctctttgttgttcagcttactagcatagcagaggcagcagagatgggattccacttgacattttgaaatgctagaccttggagtcaactatatttagatctcccttgtctgtatctctaatgagaagcagaaaatgaggtatttagaatgtgatgagtcaaattttgatgatatggagttaaatctgttagtgggttgttctctggctgttttaggatgaagatgcatggataataggctttcacaacctccatttctctcttcatgtccctctgttctcctttcacgtgagcactctggtctccatgtcgtgtgtgtgcttttatgggtcttagccaaaagttctgaaaactttctcaacttgtttccataagtttcttctttattagaggagagtttcttttatatttaaagatgttgcatttaaagatgctgaagaatggtagctgctaattgttgacatggtgttgggaggtggtttcagagttgtcagtgtcatgtagtcctttagcctgggcagtcgggacaaggtaaaactaagaaaaccaaacaaaccccactttgacactaccagaagcttttgctaggccaattcaatcctgtttctgttggcatcgttttatttctgaaaattccttctgccactgatgtagcatcctgtccttctcaaaatgtctcattttagctcactggcaaacaagtgggtttggcagttggtacctctattttggaagtaaagaaactgagggtaagaggggttaaatctaatgagatcactcagtttacaagcattgaagttgtatgcgaactaagtctgtctgcatgggcttattctcccacaattccctgggaggtggcaggtcatcttagaacagtgggaagagatagagctcagaataataaaagtgatgccatagagtccatgttcaaagccgtttagctgggtcccttcaaacagcttgttcccttgtcatttgactgcctggatgtatcagcagtgaatactgctgtgtgaagtatctttttgttctacatcttacccacatgcacactgaatgtgcacaccacattctccagtgtcatccctctcacttttataatactactatttctgaattatttcttctgatgacactcctgtcttattcccctgcccccttttctccctaacatatattaatatgtaaccacattacaacattgtgcaaaagcattgcatttcactgttaattatatagaataaaagaattgtctacactttaggcttgttttgaagataatcattattgataataatgaaaataatagcaagagtgtgagtgtaagtgcagccatgttttgcacacttcctgggcgcctctgccatgttcacagcatgaagttccactcaatgctggtcacactgactccttctcatcatctcttatgaaagacatgtccacccagagcatggaaagaaagaggttttcccaagagtaaggtttagaactcagtgactgatcattagtttctaactctcaaccatttgtctgtggtgccttctaatttaagtaaagcaataggaacaaatggtgcctaacaagtgataaaagactcattaatttattcaacaaataaccttaagtctcttctgtgttccatgttctggagacacagaagcaaatgaaactaatgagtgtgtgtgtgtgtgtgtgtgtgtgtgtgtatctgtgtgtgtctgtcataagctgagcatggtagcacatgtctgaaagctcagcccttaggaggtagagtcaggaagaccgtgtgtttgatcaggatgaacactgtcttagttaagtgaagagacaccatgaccatggcaactcatattaaagaaaacatttacttggggctgttttacagtttcagaagctttgtctatcatcatcatggagagaaggatggaggtgtgcaggcagacatggttctggagaaggacctgagagtttacattttgatctgcaggaagcagaaggaaactgtcacattaggcctagcttaaccacctgagacttcaatgtcccacacctattccatcaagaccccatctcctaatactgccactccctacaggccaagggtttaaacacttgagtctgtggaggccactcctattcaaaccactacgagcatcatagcaagacactgtattaaacaaaacaataacaacacacacacacacacacacacacacacaaaacaacaacaaaaacagagtatgctgcccttttgtggggtagcaaacaaaagaagtaaacaatacctgtgtgttttctagtaatgaatgcaggaggaaaaagcaaagcaggacaggtactaaaggatcctgggagtttgcccagggaataaacaaaatgataaataaccatatgagagacaaagcctgctcttcatgttcaattaacgctgattgctggcaggttctaagttggtgtagtcctttactctgaaccacagattgactctacttctatactcagctcctcgacattttagtattagcttttcaacataaaaatagaatcctacccccacctaaagccacgtggggctttcagtgtgagctctgtgatttagcagttattgggttcagctgctcagcaggctgcagtcacttaggtatgtgtaaagtcgatactccgtgtgtgtgaacacagttgcttttacacaggctcatccttcaccaggcttctgatcctgttagtgctgtttaatacgggatggaattatgcatgaagaaatgcaaggtagaaagggtagaaaatagagggtgtttgattattggtctgggtagaggtgttgtatatgccctggaattgccagtggaacttggacagtgacataaacacctgacactgaagtgtttaattgcagaagtgaagtctgtatccatcatccttagaaacggagttcaaaaggcaaagttcaccatttttccctttggaaaagaaagtctctcggcttcctgcaatcaaggaggccaactatgcgcaaagctaaaataaacctttgtgtgcctgtgtgggatatgcatgtgtctgtgccgatgggcaggtatgtctacatgcatgaatacatgggagcccagaggaggatatcaggtctttttatatctatatccaccttacttctttgggaaagtgtctctcattgaaggtcaaacaacctcagccatcctcttttctccattccttccctgtggtaagaatttgggaattatggtttctttgaaaaacacagaaatataagtacatgttttcaatttaatcccatgcgtgagatatggggctgcttgaaattgtccacaacagctggctataatttgcttctggcaggggcgtggttttgccagatgcagattgtttctgtgattgtgtgacatttgaaactctggagtcttttcagactgtatataaatgctagggccctgagagactgggggaggagggggctttggttgttgttagttgttagtattgccgtttgttaagtagtggtgtgcaaagaagaaacaacaagaagaaacttgatatcgtaacaacaaagatcaaacttgccccaaagaactctgtgcctataatcaacagaatgtggtcaaatgataatattgtcccccttcccatcccctgactttattttgagatctcgttcctttcctctctgttcttttcctctcatatgtagtgttaggttgttgaaagggtagggaaaaggtggagaagggtgaaagaaagaagagcccacacagtacaaaggctagctatatttcccctcatacaactctgggatttcaggtgtatgtggccatgcctggcttaggttgaggtgggggtgatgacaatcaagacttcggtcttaattcttaaatagcaaatatccttatctattgagtcatctacccaagcctaataacacaactactgttttattctcctttcttcccttgagtattttatatcaaaacatctgtttgagttcatgggtaccatttgggcaaccagcttggcactgtcaaggttcttgtcctggcaacccttttaggccacctttacagccttttgctgaggtatatagttagggcttaatccatatcaattgttgaacacttccatatggcccaagttggacatcttcttaatagatgacatagattggatttgtgggggaattttccccccaaaatatttatacttcttagaagacataacagtgctgtgaagcattacttcttgagccctgatttttagaagtgctaaaagtaacagtaaggttttagatgtcttgcccacattttggtcaggggatgacaattacagaacttgtgagaagcaagcaatgtggaatgagaagaaaacccagatcttgcctggttactacaatcagggagagtagactatagtgagagagtagcaaactaatctcaaggactcttaagccattctactggtgtgttctagttaaaaggacatatttgtgctttaagatcatattgcatagaaaatttttctggctcagaataattaaaggagtctcctttaggtctcacaacataattgacatacaacaaattgatggatgttgtgtaagtaaaaacacatgaagatttgcaggtggggagaacatatgcaaaggccctgtggtagagaagagtcatggaaaatgtacatgagactagagaagaccaaaggcatggggtgagattgtgaaggtaactgagacaacaaatgccttctggatcatgtttagaatttaggtttatttttatcccaggtatagtgaagagtccagaaacagaagaatcagacttgcgttttaataaattcagtgtagctgtagagggaaaacaaattaaatataagaagaaaagaaaggctttgggaagacaggtgtttaaacagaatgagaagacagactagttaatactgttacaggaagcctaagaagtgtcagggcaaggaactgaggacactatgagacaggaacaagacaagcctctggctagagctcaaggaagagtgaatgctcaacttgttgaggtttcattggtagaagtgttgggattgcaaatgaacaagaaggaaagagaaactgaaacaaaacaaaggcagagatggtgctgggcagagtatcagcaatgacacgatcaaagcccaaggtagaggtaaatagagagtttctgcttgctctgtggagaacttaaaggggtcaagcagaaacagacgtacaagaaggacttgccctgaaacctgttggcacctataggagcagacagtgccagtggcagagatgacttcctgtcaagatttcagctatggtttcacagggtctggacactgtgggtcagggttcagaattggggtccaaatgggctctctagagaatggctgagtggcacagcattgcagctggtgagccaagaaaacagaccttctcttctgtgatttccattggagggtgagtaagaatgagggagcaccctgcccacatagaactcactacaggttaagctatgtcacagcgtgccctgtgggcatttgcagctcagtcgtgtcaggaagtgtgcttgggatgctcagcgactcaaggtccctctggatctcaccagttattcacaagagatacacgacttagaagcaatggcaaactcaatgctgagaattaagtgatccttaggtttcagaaagcatcatctgaagcttgcatagcatcttacctgttcccactatgttactttgaatttctagagttctttccttaaatgtatatcatagctaagcatacaagatggtatttctgagtacccaaccttagtggaacatggtccactgtttatacaggaatagcacatgacatgacagttctataacagagaccaagccatatacagatttgtcaatgcaaggctagcatgcaagagaacctggtacatctgagcagagtctttgtgaagggggtcagccctcccaacatagatagattggatggtaaaaatgagaatgacagaaattcatactggaactaccattgattgtacttgctgcatataagaaactcagtgacatctcatttcctctgtgcagtgactcttaagatggccacagtcatgcccatgttagagatgaacaaattgaatttgaaagaacttacatagcttgctctgggccttgtaagtcgcaaacccagctatgaaccgaaggttgtgtattagtctgggtactccagagtagcagaacttgttggaatgacatgcaggctatggtctaactaatccaaaaataattagctatgagcagaaaatccaagaatcagaacttgctcagtctgtgtgctgaatgttgaagtgggtcttcagtgtatgctggaatcctgcagaaggggagagtataatgccagtgaaggaatggacttgctaccaaggaagggcaagcagggaacgccaaagtatctttctggcttcagcagaaggtgtgactcagattaaaggtgtcttcccacctcaagatctggagcaaaggtgtgtatcttcctacttcaaatgtttggactagaagaggatccacccactttaaaccaagcccccccctccaaaaaaaatctcttacatgtgtgccctctatttctggactgtagttcattccagatatagtcacattgtcaaacaagaatagccaccacagattgcccatatttaatgtttatcaaagattgtatcgtagtttctaagatctgtagagacagatgaactgctccagattcaacggtgaaaggagacacaagcgcaggtgaaagggcagcccacccccatcctgatgtaggaccattcctttgctcatagctcctcggtctctagtcctcagacacaatggaatccccatcataacaacctcctagcaaagataataacagtgtttccttgctcccatgtgtgatcacattttctaaaggaaaaaaagttattacacttatctacgcagctgctgtccaaagattttccattccctgtaatttcttaagcttgtaaaactgcccactttcaaatataactcaaaatgctgaaggcggaaattcatttccttgaactttatttaactaggccacagaatcattctgagagaatcatttaaattaatacgtggcattactgtattaaagggaaagaaatttccccttaattcccaatttcagagtttctcgatacctctgttccgggctctgacccccatgattgtactcgacctagctactgacaagctgcgcatactctgaaaccacactgtcaggctctgggattctgaggactaacagaaatggagattgcattggattggattttttttccttctctggttgttcagtcagctggctcaccagtgaactctggctgtctgtagaaagcaggaagaaagaaagaaatcaaaggctcgaataggatgtgcagacagttgcatccccagcaacagtccacctccagctgggttagtgctggacgagacagcttggatgaaaatttacgagtcccggagaacaacaataagcaaaattaacgaatggcaggatgggcggcagaaggagaaagtcaagcatatgctgctcattcgaatgggggtttcattaaaaatctccttcattgcaccctaaaacaatctgtccttgccagataacacattggacaccaaaaggctgttcccttctctggctttcttagttgtaagccaaccctttaaaaatcagaacacagctgctcatgacaaaataaatttgtcagcttgtctttgaaggtaaaataactcgggggagctgcacgcttcgcaccacttactgacagcagtgagctgtgctggttgtttgtatgcagtcaacaccagtcaataaacatctgttggaatgagagtggtggcgctttacgatgcattatgcttcattaggaattggttttgtcttcaagggaagggggaaaaaacaactcatgtaattaaagaacaggatcttgtgctctcatattttccccttaaagacctacattcttttcaaaccattatttacagtacatttatcagcatttaaatgtaactacctctcctcgaacaaccatctgttcataaacaccatccttttggcctccccagaggtaaacttggctgagtggcagtaagtaatggcattagttgataggtacggactaagcaccagtgtttggaaatgattctatcaaagggtgtggtagctagaattttcaagaccagctaactccaccagttcttttcacaggctgttctaggtcatttgcattatgtctgcaatatcaggcatgctgtacattttgtcatataggaaatgccacatttttgagaggtggcttggattattcatgaaaacaataaagctgtgctactactgtggtcactttctaggcactggaaacttcccactgagggaagcatccttaggtgaacataacatttagcatgaccaagtacacaaataaagcataaaatacctggtaatggccccaaattattcaaaacacagtagctgttcccattagcttcatatttattaactggtgcttttcagagagcagaaacacaaataagctctttagcggaatgacaaggcagagggtggaacaaactcaagggttaggacaaatgaaactgtgttttccttcctgtggagtgcacaatggaggctaaaaataaaggggctatggagggggtggttttgtgtgaatcagaactttctttgaaaatcatggttgtcctggttttcttactgttgctgtgataaacaccatgaccatgaccgggagcaactgtgagaggaaaagattcatttcattcaacagatcatagtccataaggatggaagcaaggcaggaaaacagagtcatgggtgaatgttgcctcattgctgggtctgaggctacattgtcagctatgttttatacatgattcaggtttacctgcctagaaaggtactgcaactgacattggacttgagtcctctacatcagtcaggattcaagggaatgccacacagacatgtccataggccagtctcacagaggcagttctccaatttacgttctctcttctcactgtgtcaagttgacaaatccatcacaatggttaaagaatttcacatagggaatgttactacatgcaaccttttgggaatctgaatgcttggaatgtgtttaatttatacattcgggggctggagcgagctctgcaagggcaaggtacttggtgctctagtctggatcctcagttcaaagcctagaacccacacaaaggttgaaatagagaaccaactatacaaagttgtcctctgacctacatacacacacacacacacacacacacacaaattactaaactgtgtcaatttgaatagcaaagtaagactgcaaaagaagaggtaaccttagatagttttgaggcagaagacttttctctaattgtgcttctggttcatagacagtaggaagagttacacagtaaatacagtagatggatagaactcttttgtcactctacatgcctgaacaaagctctttttccattcagcagaatacatgtctataaaatacttggcaattttagaggattaagagatgttgggaatatttggaatatacgtgcatcctggagcttttacctgcccactcacagttaccttgccatcttagaggctctgggaaagcaagtgatcaatatgtaccttccactttgcttaactccagcatcgctgcagtttccttcacataagcccttctgttcagcatgtgttttagcatctagcaacacgtgtgctatggaaacacactttgtcaatgctaccctacagtggtgtctcctcagcttgtgtaactaatccactgcatgaggactaatggatcagaagtgctgaggtgccatggctgaacgtcccacttgaatcagagactgttgatagaagatcaactacagctgggtgtcatgggaagggtgctgtctgatctttgaaattagattacttagcttcccccaaggaagaggaagaggaagaggaagaggaagaggaagaggaagaggaagaggatgataaagtgaagaaccatccagtaactgggaaaggagccatataaaggttagcagataggaaaggtcagaccaatttcaacctgctttgattaaagatagtagacttagctctagttccatctgagacaactacctttttcctccaagaccaatcttaaaggcacagctctgttctcttttctccttcttccttccttcctctttcctttttattttcttgtctagattttaattgttgttgttgatgatgatgatcttgactgtagattgactggactgagaaatgcctcaactcctaaggcatgcttctggatgtgtctttgagtttgtggccagagacaattaaatcatgagggcttggaactaagctgcaggttcattatggagtcataacaagatgacattattggcctatggagaaaggtgggaggtaggcctcactggaggaggtaagtcaatgggtgtctgctcttgatggctgaatctttctctgccccctgccccgtgtatccttgttcttagctctttgagatgccctccttcataatgccaaccctatgaagatgaactctaagccaaagcaaatccttccttcacattgcttatattcagtgttttgttagagaacacaaaagtaactaatgtattaacttattaccttgaacccaccagattttcacttaaactgagctttcggagttgcccaaagttcatagagctccctgctcccttccctggcagttactcactttattaacacctccattcttaggttcatactgaagaactgaatggaaactgtgatctcacttatagcagccaacaatactgcagggtttatagttagggtctccaatagctgggactgagagcagttgccttcctaagacaatccagaatgaagtaaggttcttttctggttcaaagtcctttcagattggtgaagatgtaaaagacccaatttgtacagatactttaagtatttctgttgctcagttctgatgtgttggatgaccatgaaatacgtcacaaggacctcatgactatcatatacacttccaatgtcctccttccttcctttttatgccctcaaatggctttttcctgtattctcttctttcatatttctttctcattctttcttcccttccctctcctttcttctctcattaactgctcttttcattctttcctttcttctgcattttaccctaaagtccattattatatctctaaatttcatacaatgtttgcagtattccttgaannnnnnnnnnnnnnnnnnnnnnnnnnnnngcttatcctgcaagctagaagcagaggtacattcagcagtgggatgcttctcagagaacatcttgccatgtgctaaccagtgatattaaaatgacggattatagttttttttcccagcttctactatgtctggcattttcgtaaagggacatgagttcttatacagtacttagatctatgatagctgtacaggttgtgcaggtttctgcctatttgtagatcagtggacaaactaggggttgggataaaatcaggttcagatttccttcaagcagtagacttggagaacaagctttttccttgagagccatctgctgctctctgtccaagaggacctgtggtactgcagaattgtctctacacatactgattttagtttcagtgagtcctcacatgctcccaaagtagtatgtcaccttttctgtaagctcaagacttctcatcagacacccattaccatggcagtgtttcccaaaaggccctcagatcagctctgccattctggcattttgcatggttcaaattcccatctaaaaaggtctctccaacatttccatactcccagctacctcactttccagcttgccttggtcatcagttctctcagaaacccatttgtttgggtctttctcaattcatatctcaacttcctctccactggtctagttgcatttgatgataaaagaattttaaatatttacagttagtttcaaatatcaattttaatataaattccattttgatcactggtaccttgcaggctggacattgactttaactagtcttctcccaggattccctcttaagaaccacaccaagcactggcgggtgacaaagtctgattctcacctgtgttggcagagagagagaactggttaaaagtggcatgttaacacaaaaatctttgatgtgtaaccctatgaagacactttattctctagatataaggaaatacaactcagcaagggacaaaataattcaagttctgcaaaattttttaaaagcctctcctctcttaaataatagtctcttgaagtaaatgcatagatcagtgaattatgtgggttgctttacatgtataatatgtacatatgtacatatgtaatgttagatgtatctctcttatgtatatataaacacacatagatgcctataagcacagatcagattttcctatgctgtgctagacattgtaaaacctcacaagtttagattattctttaataaaaatctacactatgggtttttattaaacaataagcattgctttcctaattctgacttacttgcctttaaactctccaataattagatattttctaacattttaaataaataccatagaagaccaccaattattttttttaaacagatgacataattttcttttgaaaaagaggttttgctataatgattttatccaaatgttaatttgatttatggaactgatattgaattcgttctcttctcatttatggcctagtaggtgccatgcagaatttaaggtgctgtgcctgatggtttgtattaacaccactttgtataatgaatgcatacatttgcatgcatccatacatgtgtatgtatacatgtaatatctgaaactaataacactaattatacaacctaatttttctatttacatgctctgaaaatcaagatttatgttcaatatcatgaaattaatttataagtgcccaacttaagagctattgaagatagtaatactggttgagaaaagttagagatgtatgacttctttcattatttccaaaatattaagtattagaagtcttttatctttggtaattatctgtataggattcttggggacatgtttagaataatttgtttgtaatcatgggaaagttgtttatactgataaaatctctcctaagttgctagccttcaaagaagagaatatatagacaattactaaatattctgaaaacattacctatctcatcatatagggtaatgcatgtgaaagtactttatcaactgatatgcattatataaagagtatggactaatgggtgatgaatactacccaatgcaatgtatggttcatgaatcataaggtatgagtatgactaggatggtatgaactacacccaaatttcaaatgttatttttttcatacctctgtatgaaggaaatctttagggtctagagaaactttgtatttattttgtgggctctggtgctttgagtgagaatgtctccctaggctctgatgtttaaaaacttgatccccagttggtgacactatttgcataggataaggaagtgtgagcttgtgaagcaagtatgtcactggggtgagctcagagagtttaaagactcatggtgctatttctagttcactctctgcttctttcttgtaaggacccagatgtagctgtctcttgtgagactatgctggggcctagcaaacacagaagtggatgctcacagtcagctattggatggatcacagggcccccaatggaggagctagagaaagtacccaaggagctaaaggggtctgcaaccctataggtggaacaacaatatgaactaaccagtatccccctggagctcctgtccctaactgcatttgaatcagaaaatggcctagtcggccatcactggaaagagaggtcccttggtcttgcaaactttatatgcctcagtacaggggaatgacagggccaagaagtgggagtgggtgggtgggggagtgggtgggggagcatgtgggggacttttgggatagcattggaaatgtaaatgaaataaatacccaattaaaaaaatctgagtccgcagcttgccaggcctgcctgctgctgtgcctcactgtcatgcctgcctgctgctgtgcctcactgccatgcctgcctgctgctgtgcctcactgccatgcctgcctgctgctgtgcctcactgccatgcctgcctgctgctgtgcctcactgccatgcctgcctgctgctgtgcctcactgccatgcctgcctgctgctgtgcctcactgccatgatagggatgggctctctctcctcctttcggaagcggaaggccacataaacccttttgtaacttgtcttggccatggtgctttatcacggcagaagaacactaagtaatgcaggaatacagactactagtagagaaattgacaaaatgaagttattgacatcaaaagtctttaaactattaaaattattaaaaacaaattcttatgagtcagctcacttgtagcttgcttcctttttataaacattgcatgcaggttcttggcaatgaatgaattaactgtcttaggtacttgaccacatttattccccttttaaccagctgcatttctgcagtatgaaaacagctttcctggggtttttggcaagagacagtaaactattacaatgaaaactatggctttttagtgacatacatctgtttaccaattcatatccaatatctaaattgtgttctctctttgtccccatggtaactttattcatttatttagtcacaaaatcctttaaagttaaacaactctaccaatttataattcataattaagaaaaaaaattgttagagtcaaacagatctgtccttgaatctggaattctatcatttacacacacacaaacatacatatacctcctcccacacacacacaccacatctctgtataattgcttcattttctgaacccagttacttacattttataagtaaatttaaatacaaatatcaacatttgtaatatgaaactcggatacttgaaatatggtaaatgcttagtgaaggtcatttcccactcatttaaaaataacatatgaacactaatcctgtaatccatattccaccaccaccaccaccaatgcctagtttccttcctttttttttaatccccgggttgattagaaataaataagagtacaaagaaagaaagtgatagttaggaaactgactgtactactgtttaacccatagacttcagacttgaaattagaatatgcatatgtcgtgaatctttagggtcaaattttaagccataatgccttcaacactaacctcattgcttttcttgttatccctggcttattaattatatagaaattatatagaaaagatggatggtattgcatcctatgcagtaaagccataatgcatgatagttagaagtaggtagatctcctttttctaaaattatttcctagtttgtggcccatgtaatcattatataaatgtgagaagtagttttaagttggggtttaacaattaagtaaacacagaaagtgatgtgaaattctactgcaaaaacagttataattgcttattcgttcccttccaaggttagagagatattcacatttaaatattttcaaataacagacatgaaaaacatcctgtgactttgtggtccacaaatcaatattgaccttgtacttgagaactttcttttgcttcaggcgataataatagcttagcccttcagcacaccctcacaggaaggcttgtatttcctttctaggacattttgcttctcggaattttgattgatacccaggtgtagctagaataagttaaggtactactaaagaaaatacacaatgtaccttcttttaacactaactaaacgttgaagaagaaaaattgtgagaagcaatatcagtttcttctcagagccccaccataactgataacattttttcatcaaaaaaggaggctgactccatttcctattttaatattcattatgaattattttgctatatggttgttttttcaggaagatgtgaatgataaagtctctttggttatggatgtagccagaactgctgaatgtaatgttttggctcagagagtcttttggttgaacatatatatgatttcaattttttaaaccaaatgaatccattcattttgtgaactgattatgctctactgggaagagttgcataggaggctgttagtacatttgttatatggccggcactatgctgggcctagagaattcttaaaaggcaagggagggaaagggagaggggagactattgtctactctgtcactctaaggcagcttttcccttcacacatacttttaaaaagaatgaaaaaaagggagcttcagtggagtgttgtgagaacatggaaagactactgtataagtctgaactcttaatgtgtaataatgtccaagaagacattgagtcattgcttggtgcataagtctatatacttccgtgcccatgaacatttccatcataaaaagatgcatcatctttcaataatatctatcagttctagctataaatcagccaagcaatgaatttgaagttgaactgtaacagctagaatgttccaatacctttgaatcttcctattatgaataatggatctgacccaccctgcagttgaacatcgggaaacccactgggcatcaaattctggactcagtcttcattcctcactactatcacttacaaatatcttgactttgtataatacatgaatcaaaaatcattttgcaatctcagtgacagtctccttgcacatactattgtggagtgaatttcatccattgcttgctgtatgtatgagctgtcgggataatctgaatttttagactcccatctggttctgaagaaagcttatctttgatccagctctcctctcatgccataaaagcatgagtggctatagggagggatatatggtacaaaatagatagacaaagtacctcttaaaattggatcagggcaagttggatgctatattggaaggagagagaaagaaaggcagagatattcataccaaaagaaagacataaactggtagaaaacagtaattctcatgtgaactttgcctggggagatgtgaataaatgtctatgcacctcagatagagtaccaatgatagaccaacggatgcgttcatgagtgacaaatcaacagttgcttccagccaactccagtttggttcattgggcctacagaaacctgggtgaatcaccaaacaatttcaaaaaagatttcaccccagcctcagtgaaaatctctcaaaagcagtagaggtgggcttacctactctcaatcttccactccttgagtcctctggaaccccgtgagaccatgaacagctgagataaaatgacatatggctgggagaagggatgaggatggagggagtggctggggtatcagctgacaggttaatgctcatctcaggcctttcatgagggatcaacaacaggcctgtcccttcaagggtcttgcataggggattacagtggctcaaattaatggtaacatctatgctatgctatgtagacagtattactcagtggacattgataattgtgtcccatctattttgttctgagtgctgtttccaatagcactcctctctttctgggctccaaagtcttaacaagtattactacatatatgactgattctgaagtcctagacctaatcctagaactcttgtgttacctcctaaattgtggactttaagtactttctagggacactcaatcagaatgccatatatctcctaaccatgaaaacacccacctgcttaggtttcctgtcagtactgaatagttcaaatcagaatctagaggtaaacttgactcttcctgcatccccttcttcttgaattcaatatgtccagaaagtactttagagtttgatctctaaatgctttctttagcactccatttccccttgtcaccactgtcaccacctaataatgaggtctaattctctcctttaatccatcaaatgacttacatgtttaccattgctatgttgctattctggttttcttgtgttccttttagtttctgccctctgagctctcactaacaatgaaaacgcatcattgttgccttctcttcaacacatcaaagtttctcttcatcaaatccttcctcatttctctctacatggtccagtacctgtctgattttctaggtttccttgcactgtcttcctctctgaactattccagatgaacatgttccgaacctcttaaataagtcacactatcaagtcactcttctgcatattcaggtctctcctcagcaatgcatgcttctatttttctgcatgttattatcttcccagcagtgacttgccctttgtttctaatctcagcatcatctatactaattccaaattttgaatcttctatcacaggaccacatttaatattttttctatcaaaatattatctcaacttgtgtcttccttccattggactatcagatctgagggcagtagcctagcatgttggatttggcactttaatatagtatcacagagaaagataatcaaataatgaatatcaatgaagacattagtgattggatatatgagtgggcaaataaatacttcagaggataagaaactcaaatttcctttagtgtaggtctttttctttaatctaattttatttgtaattcatttttacacttcatatttcattccctgcccctacactccaaccctccaactgctccacctctcacacctcctcccaaccacaccccatctccacaaggatgcccacacgctccaccccatctgacctctaaaccccatggggcctccagtctcttgagggttaggtgcatcatctctgaatgacccggaagtcctccactgtatatgtgttgggggcctcatatcagctggtgtatgctgtctgtttggtggtccagtatttgatagatttcgggggtccacattgattaagactgctggtcctcctataggattgcccttctcctcagcttctttcagccttccctaattcaacaacaggggtcagctgcttctgtccattggttggatgcaaatatctgcatctgactctttcagttgcttgttgtgtctttcctaggtcagtcaggatagatccctttttgtgagcactccatagcctcagtaataatgtcaggccttgggacctccccttgacctggatcccactttggacctgtcactgtaccttcttttcctcaggttcctctccatttccattcctgtaattctttcagacagaaacaattatgggtcagagatatgattgtgggatgtcaatcccatccctcacttgatatcctgtcttcctgctgaaggtgggctattagctctctctccctactggcatttcatcaaaggtccctctctgtgagtcctggaagtctctcacctcccaagtctctagtgcatgctggggggtcctgccaacctcctatttcctgaggttgcctgtttactttctttcctcaggccctcagggcttcagtcctatttcctcacctagtaccagatgaggttcctccctccacatcctctttcccttccaagtccctccctccaaccccacttatgatcgctttcttctctctcccaaatgggactgaggcatcctcacttgggcacttcatcttgttgaggcttttgaattttgtggactgtatcttgtatattctgtatgggttttttttgtttgtttctttctttgtttgtttgggtttttttttttttttttgctaatatccacttattagtgaatacataccatggatgtcctttttagtctgagttacctcacttaggatgatattttctagttctatccatttgcctgcaaaagccaggatgtcctctttcttaatagctgagtagtattccattatgtaaatgaaccacattttctgtatccatttttctgtcgtgggccatctaggtcatttccagcctctggctatcacaaataagggtgctatgaacatagtggaacacgtggccctgtggcatggtgggccatcttttgggtatattcccaaaagtgatatagctgggtcttcaggtagatctgtttccaattttctgaggaacctccagatttccagagtggttgtaccagtttgcaatcccatcagcaatggaggagtgttcctcattgtccacaccttctccaacatgtgttgtcacctgaggttatgatcatcaccattctgactggtgtcaggtggaatctcaaggtcattttgatttgcctttctttgatcactaaagactttgaacatttctttaggtgcttctcagccactcaagattcctcagttgtgaattctcagtttagttctatataccattttttgattgtgttttttggtgattaacttcttgacaaaggcaccaaaaatatataatggaaaaaagaaagcatcttcaataaatggtgctgatctaactggctgactgtatgaagaatgaaaatagacccatatttgttaccttgtaaaaagctcaagtccatgccggggcctagcaaacacagaagtggatgctcacagtcagctaatggatggatcacagggctcccaatggaggagctagagaaagtacccaaggagctaaagggatcttcaaccctataggtggaacaacattatgaactaaccagtacccctgagctcttgactctagctgcatatgtatcaaaagatggcctagtcggccatcactggaaagagaggcccattggacacgcagactttgtgtgccccggtacaggggaacgccagggccaaagggggggannnnnnnnnnnnnnnnnnnntttgcaatcccatcagcaatggaggagtgttcctcattctccacaccttctccaacatgtgttgtcacctgaggttatgatcatcaccattctgactggtgtcaagtggaatctcagggtcattttgatttgcctttctttgatcactaaggactttgaacatttctttaggtgcttctcagccactcaagattcctcagttgtgaattctcagtttagttctatataccattgttttgattgtgttttttggtgattagcttcttgacaaaggcgccaaaaatatataatggaaaaaagaaagcatcttcaataaatggtgctgatctaactggctgactgtatgaagaatgaaaatagacccatatttgttaccttgtaaaaagctcaagtccaagtggatcaaggacctcagcataaaaccagatacactgcatctaatagatgagaaagtgagaaagagccttgaacttattggcacagggggaaatttcctaaatagaacagagatcatgctctaagatcaagaactgctaaatgggacctcataaaactggaaagcttctgtaaggcaaaggacatctgcaacctacggattgggaaaaaaacttcactaaccccacattcaatagaagactaatatccaaaatatattgtgttgatccttagcctcccccagtagctggatacttcgtgcactgatatattgctgtcctaaggaattaagagcatggccttcaaagcaggaccccttagttataatgatctgtctgtaagtcatttaatatcctttagcttcttttttctatcaactagaggctatattgcctcataggtgttgtcagtgaagggatgaaatggaatattccctgtgaagtatatgttgagaggctgtttgttcctagtgagactaaattaaatgatagctatgacagtgattgagaactgtcaaagaattgcaaagagaatttggaacctttgacagtgatgactgcatcacaggacagaatggaccatcatcattactttgtcctctgtctgtcatgattattcatgcacacagtactgcactgcgaatgcctcatctatccatcttctgtcagagaagaccctgtgggccacttacaaatccactatccagcagttaccgcattttgcctgttatagtttagtctaattacttcagtgactgtcaggacttcagcataagtccctcagtatacagaccaaagccacacataattaaaatgacactttgctagagaaaagaagttgttgtcttgagacaggacatagactctgagtctggctgcctgatttagatatcactcacttttccatcactgtgacaaaatgcctgagatatttgcttttaaaccagggaagagtgaatttggcccatggtttcagaggtttattttgtccactgtcctttgatccctgcagtgaggagatgcataataacaacaacatatggcacacaaagttgcttgtattgagaaactaggaagcaaagagaaaaaaaagaaaagatttaattccccatattccctttaatggcaagctggtaatgataacttctctagccaggtcctctttctcaaagttccaatgtaacatgccatggacagggaccaagccataaacatgtacgcctttgagaaacttttcaaatgcaaagtatagctcttcccagtggaggactatctcacctatcagagcaaatgtgaggacaaagaaggtgtaggccatgggagattaacaccaggaacccgaggaacttgttatatatatcatacatcattatgtatatttataaactaatctaattatataaattatacatcattatatattcaacaaattatatgttatatgtataataaaagtaaatcataaatcatatatttatagataatatatagtgatatttgatatcttattaatatgatgtattaatatatatactatatattgaatttgccttctctctttaagacctattttatttttatctgtgaatgtgtccatggggaaggttgcccatagagttcagaagaaaatattgaactatttggcactacagtggttatgaatctcatgacatgtgtgctgggaactgaattctagttctctagaagggcaaaagacacactcagccactcagccatttgcttggtcttgtctttctttttttaaaaaaaaaaaagatggtgtttgcatgagtgtgtgaaagtatataaaggtgcaaatgtgaccgtggtatatgaatgtggtatgtacacatatggggagtacatgcacctttgtgtacacacaaaggcgatgggatgacattttccctttctctaccactgatcttattcctttgagatagagtgtctcagtttagacataggagaccagcaagcttcagtgagtcacttgcctccaaccctttacctttggaattatagagaaccatgcccaaccaacatattcaaccatgctttattagcttttacatgggtgctaggtcctcctgctggcgcaggaagcacttactcactgagcgacctttctaaccctagcaaacattttctagtatatatcttgcattgatgctaaacaccattattctaaaaggtatgttcaactctccacatcagacttctcagtacattcctctagagagcaagagctagtgaatagggtaaaattccgtagcaaaccaatttgttattccttatttgtatgcctcctcttacataggaatatttaattaaaatgccccattacatatttttcctcagtcaaaaagtcgtgtgaaagatggagtgttttcgacaaatggcaatctctctttcatactatacactggccttcagtaagtccccactgcgaagtggtctacttcgtgattcctgaggaactgtttaaaggtccatacctgttagttctggaatccattagaagaaccattggacatgctgctctctattatgtaccgatcattttctaaatttgatgctttaataaagctttgttactaggatactacagaaaagatggcgcctttgaatataaagatgtaccgattttgttatgatcttaggcacaatctattttctagaatcaggtacatgtcccagctaaacatgagcttttgtatatggctgcctttactagctacctatctaatttgaggtcctgcactttatggccatttttctgtggaataaattagtcatacatctactatacgcaggcatccctcacatctccagatacttataaatgaatgcaaacatgttcagggacacatttatgaaaccagcagagccagtgtttggggagtttgatattctgctcattatgtctagttttgcggcagtgtctgaaaaatattggtttactgagtataaaatgcctcatgtttcaggctattcattcaaaagacataaacatagtcaagttccaacagatacacatttgtaaacagagagatgtcctaagagtggtactgatgtctcagaaagggcagttttaaatcttcataactaattacattacaccttaaataaatgcattacaccttagcatcacagtcaaggtgcagcctattgcttgcacagtgagcaggacattgctattctacttaggcattgccattctccttaatgttacctcactgtaacaagtaagtttttgtggtatccttaccctgtattgggtatggggttgacacattcgcagcatactgattccattagtttgctagtgtacatagcaaaatacaacagacagaaggaagagaaatttagttttgcataattacaaagactggaagtctattcttaaggcatcagtgggtatggtttctccaaaggatgcctctttggctggtccatgactatcctttgctgtgtcttcacctgtcctgttctgtgtgtacaaacaccctggtgtcttattgcattccccacaatttttttaagagaaaagtaagactatgttagacccctgtattggctagttttgtgtcatcttgagacagctggagttatcacaaagaaaggagctttagttgaggaaatgcctccatgagatccagctgtagggcattttctcaattagtgatcaagggcaaaggccccttgtgggtgggaccatctctgggctggcagtcttggttctataagagagcaggctgagcaagccagggagagccagccagtaatgaacatctctccatggcctctgcatcaggtcttgctttctgacctgcttgagttccagtcctgacttccttggtgatgaacagtatggaagtgtaacccaaataaaccctttcctccccaacttgtttcttggtcatgatgtctgtgcaggaatagaaaccctgactaagacaaccccattcagtcacttttcaccttagtgtctttccgagtctgaatctcacattgagaggtattggggtgaggcttccatctatggattaggggatggggacattgttcagcctatataaaagaatgactctcatgtgccttatctactgtgttaggcttcctgagtgaaggcaaaggcagacatgcttccctatattctacaggatatgttgatagactgaagtggagaataattatcaaaagcagtattcaatattcaattaagattagttctataaaatagaatggatttaacctgagggacttaagggttgaagaatctaaataaaacttaagtatttaagctgtgaactcaagcataaaatggctttgtcaacatcacttattaaatgcttcctgtatgcctaacatcattttcaatactcattttatttcatcaaatatttaagtatatgtaacatgagtagtgttttcactcctattgtattgacttagaaagtgatgcacttttacttgggtttagtggatcacacatccaggaagtccaatagacttcagagattaaagtcttaaccattaggtgaaggaagaagttgatggctaggatataaataatgaatgtaaaaaatggcaaatacccagaaacaagtagagagaaagctggtattaccatggtgctggagtagatctttaagaaaatgaagacagtggtaacatctatttcataatgaaatccttagaacttagtgaaaaaatagcaagacagacatttcagatttctgcaaaggcagggtgtgagggaagatgctgcctgccaaaatagagaacagttgcatttgtaaatgaggctatacactctttagcactttagattgagattctgcctcatggaaaaacttacatggaaatctcaaggagatatttagatgttgaacctgatcaggagagaaacccagtctgaggaaagaaaagtatatgtcaccaatgttttgttgaaattcaagcctatgccaccaaataggatcagctagccaatatgtactgctggagatgataataggctatagagccaagtcctagggctgaacaccattggaaaatttgatagaagataagccagcaaaggagactctcaataggaagactaataccagggagtagagccatacaaggagacaggggcaaagggaggagttctagaaaggaggtcatacctgttgcatgcttttgtctgaaaaacgtgtctactgggattgtcaatatggcagccagtgattctttttaatatggcttcatggatagactcttatacacgctacaggatgctcagtttcagacactcataactaattgcgttgtacttcagtatcacagtcagtgtgccatctaaatgccatcgggacagctgattccccttcctgtcttacagagctgaggcctgaaacttacttatatatttctagtggtggtcacacagctctgtagcacagttcacgtttcagaactgaggctggctacctaagggtttgaatgcatcagaattttgctctctaaaatagacaatccactactcctcttatttttatttcatttccatgtttttattggtatatattaactcatgcatgataacaagtttagttatgatttcagccatgtatataatgtattttcctcatatctaatatataatgtattttgctcatatctaatatataatatatataatgtattttgccccccattatcttcttttcttatttctaacttgctgatcctttttctccccccgaactagtcttccttttatgtcctatttttctttcttgtggagtgacgatgccctaatgagcctcattaggtttgtttagagggacatgaatgagtagttgcttatagaaacatgcacaccttactttggctacaccactgtaaaaaggtctctgcttatagaccctcaggagacatatgtcctttggatccctgccccacagcttcaaatagttgcctagaaatcctcattcagcttacaatagtagccaattaatttaatatgtcaaatatgcatttggttagtaaagctttttggaaaagtatccatggtacagaagaaatgcctaagaaaggcattcatgtaactgtcctaccaagagtgactttaaagtcctgtctcctttagatctcatagggtgtctcagagagaatggcttgtccacttcatgaggcctatataatagtcctctttgcatacagattaatggaataggttggggttatactttaaacagtttatctccataaggcaggaactatggatcttccttatgcttctggaagaagctggggcaaggtcctttgctcaaatgttggttgagttaaatcatgtgcaaatgagaagagctttgttgagttgacagccctgtacttggaatgaatcaagcttgtgttttaacagagacatgaacacaaaacaaaacaaagcctataaaaatacttggttccctttcatgatcatggagccagtaaccagctgcacaaattcccctagaagactatggctttctgatttgcttctttggtatctcccctactccaaaattaaagtgctgttttcttgtaggaccatttcccaacttgagcattaaaaccagaatgcattcatttcacaaatattcccatttaggtacaaaagaaggcaaaggtattggctcagcttatatggtttgttctccaaagcagagacaaaaatcttttaccacacagtttgactaatgccaggtgtgccaagtctgtcaaggtgaagaacacagcaacagcacattacaaatgctctagagactacaatgctgttggctggaaagatgcagatggctagagtctctgttgaaagttgtgtatgtgctcaacctagaagatgcaaaggcttttaatgcacagagaatgatgagggagtcacaaaccctaaacagttgaagtattcttggcctcagaagggtttctccaacactttgtctcctctaggacatttgtttgtaggttatgacccttagtccttcaatctcattgcaatgaataacagagattcagcatgtgtaagtttctaggggaaaataaggttaattttctaaaaatcatgtctaatatatggtttagagatatagttcatgtagaagtacagaagatggcaagactgacgcacccagaggagataaaatacagaagatgttgcaggtcatattaaggaattagacatgaccctagagagttagatatacacaaggggatatagacaggggaagacttgtgaactttacaagattcaaggccttcaccttgaatcttgtgaagttcacacatctgaaattgaacaactagaaatggttgacaaacatagggagatgtttgtaccaagagaagagcatacaaacacagacacagacccaatgcccactcaacagcaggccatcaaacagagattttcatggagaaatgtcaagaataagtagagaactagacaactaccaaaaacacatgcacacacacaaagtgatagacacagaaacacacatatacaccaagatactagagtgagcacagagagagacactgcagaaatacagagacgtgcttccacatataggtgaacaaacatgtgacctatatttagaggagaacaggaaagacagacagatagacagagaagagcagaaaggcagagaatagttcgagatatgcactttaggaaggagtggaaagagagacaaccccagggagagaagaaacaatagccagggttaggttatgggcttgctcacttcatgagagtgcactttggaagaggtgtggtcttttccagtggcctcagtcctcttgtaggtgagcatattgctatgttgtgtgatccttgggctttaaatttttgctcctgttgttacctcttcaccttgaactcaaaccagggctgagttgtatgactagtattttgttccaaagaaggaacatggggactttttagctttgttgaggagtaatctacaactgatctaaagacaccttgtagggcagtttaatgatgacctgacttcagaaagctgctcttttacataagggattggttgacatggttacatctagatgttaagcaggaacatgacataaaaaactcaacatggtgacaccagaaacaaagaccattgaaaggccatacctctgtgggagagaaaaaatacctactaccctagtgtgactgagaagtggttactagggaaggtaaagataccaaggtgtctcattgcagactggagtgtggggatcccaaaatggccatgaaaggcttcagggtggtctagaaagatggcattagtgataggacagcatcgtgaccattatacctggtgaacttgacatacataatgggtgctcttatagagactctctcaggctgtttcagaagggtgcattacagggtttcattctgggatgcagatttggcaagtggttaggaccaaggaagggaccatgaggcattttgtgtgttgttatcttgttatgctcctatcgccactgcttactcttgctcatctcatctgtagacttcagaagccttacaggtcttgagaatctaatagagaaatgatgactttcagtgttagactcaaagatgcttccaaacttacatagaatttttaaaatatcacctactgcctgtgacatctgtcacagagaaaattctacccattcttcccctgggaaccatggtgaactcacgagtttataacacagaaatggagagctcagcttgctgtttcccattctagtgtggaaggcagtggggcctgcaggagggcagaagtgggcaggtaaatgaagaggccctgctacatcatacaaggagaagtaccatggatgagttcaaaggcctgatgtaaaaggcaagcaggtgacagtttcacctaacaatcatgaaggaaaggctactattaggtacaggttaggggttgggggctttgctagagtggagtccgtaatggaaactaagcaagatgtgttgatgaacattttctacttcaggtcatgctgtcacctaggagtgagaaaagagagctcatggtgtcaggaagggcatagtgtcacatggtaatgtctcctcttgtgtgagaccaagatactgcgatcttttaaactgatggccaccatttactgatatgtgcattttatatcctactttgactttgcactgaggcttgcttctattgctccatgagatgtttaaagcatgcctggaaagaggaaacagagagggaaagggaaagagcatccccttcttcatctctctgagaggacactcaggcctagagcggctatgcataaagctagactttgtgcctgcacattctttcccacactcttaaaagtgtctctgtgatttagtcccttctcagagccctagttcctttataagaaaaactctgacagagctcaggtgcctcattacttaattatgcattgttgtgatttgtatgggaagtagctatttgtttaattcaaagtcatagcccacattccccctcagcaacactcactaattaaatatgagactggaaaaaggtgaggagtgctaaacaatggcctgtgtatggaacatggtgttcttatgtaaacatagcccacagatcacaggctttgaaacgtatgtgtacttaattagccaaacatgaggtgcgggttgacataaatagatactcctcaataaacagcaacatgtcacagcattagctagaagtgtggtagctgagaagaaattaatcactaacacatctgggtgtgtgtatgtgtttcttcttataattagttaccctttcctgggtattaagtgatttatttagattccaagcccctgtatccatggtaactatggttttggtggggttttttctctccatgccaaagtcttatagtaactaaaagacaaatccatgtatgaatgactcagtagctcgtaggacattaagggaatagctgttatgtaacaaaagcctgacaaaaggctgtgggggaaggtggtcaaatcatgtgtgcttcctgctcagagattcagatgtagattagaaatgctgaccatagaattaaagatcaaggggagcaaatgtcttaactagagtatctgggaagaaattggggcagaaaaaggtgacttctacatgaaaggaacagagaaggattcccaaagctaaaactgtaactcacaggaactataacaatttgccaacattaacaagggcctgggttgtgtactacatcttacatataaaatttatttgtatgagtgtgagaagctcagattcaagatatagatcaattcattgctgaactcataccattgtgtttctttctggatacattctcccatctgacccaacacacaagcacagtcacagataagagaatgttatctaggctatataaatgaagttgcaaaattctatgattctgtgataggaaaagagaagaatccagatagaaagtggacataagatataaagaatatctcaatgaagagggtgagagactataaaagcgacatgagaaaatattcagcatcagtagtcctttgggaaatgtaaattaggaccacagtgatttatcactacatatattaaaacataaaattcagaagccacactatcagatgctgctgggaaagagaaaacaaacatctctggtagaaatataaaatgcaacagccactctggaaaattgcttggcagttgcttaaaagccgaatataaattgcatgtatgactcaacaattctcccttacctctgagctcttatcacagagagatgaacagatgtagtcacacaaaagctgcatgccagtacttagtgtagtttgattttcaaaactacagccaacctacatatccctccataagtgtataggcaaagaacatccatacctcaaaatattacccagtgaccaaggaggtctgtgtgcatacaatttggatggatctcaagggtattaatgttgtctaatggtcaaacatcacatagtcttctatatatagatttcttaaactgacaaaatgattgagatggagtgtagataagcagaggtggaaaaagtatgagagcagtcaggaaatgtatctagaactgacacaaggctgattctgttgcaatgaattgttctatatcttgagattcctatgcctatattaatcatttaagaagacaaagtggcacaggcatagaaggttgtcttaattattgggaaaataataaaactaacattatctactagagagtatctactagagaatttatttttaatactaaggggcatgatgataggaattgttgaaagcattattgtgacgactttcacaggagaaacctaagaattccaatcattttgctctggtcagtgagtaagactatagagtagagacagatgtgggcaggtcatttacctccaaagctatagttctcattaccactctctttttcagcattcatgcatttgagccaagatgtctgtgtaactaaggatttatgttgggataaacacacctatccatggaggaactgaatgcttcctgccactctgacccagtctgtatgagatctaggaagcatagctcagaccccctgtacaagtagtactgaggaggtcactaaaattagcttggacagactgggttcttcttgttgccctttgtagtcaatggtgctcatagaaggagattgattttctttgcactgtatgcagagaaggggctgaaaataaaggaattgttagcgttcttcctccatgcagtatcttcttcctccagtttccaggctagaatatttgaaattgaaggcatgtcttttgtcagtggtccatccagttacccattccccttttgtcaagcatgtcgaaaacgcctagtgttcactgccttcctctttaagctctttaagcctttctactttctgacttctacctgtgttttgtaaaggattcttctttgtggactgaaatctcaacatgctgccaagcatgcacccatagcacacatgccttggtattcttcctatgagaacagcagaacaattctcaaaacagggggctcagcattctgtctggaaccagttgggtgacccgttaatgtgaacaagctacatggagtcctggtagagagttgttttgctatgaatgagagagggaatggacaaactgggatctttgcaaacattttcatcatgtggaatgtctcatggaatgtgaagaacttgaaggagagacttctgttctactcaggtgacatgatttactttaaccactccagtacctggttgaacctgtgacagtctggcaagtcctgcccagatgtgtcacaaatcactaaccttagttctggtcttaaaaccggtttggcaacatcaaagagacaagcatataaatgaggcaggaaacatggattctaaagaactctagaacagtgggtttgagtggagctatgtactcaaggaccttatcagtgttaaagacacataacaaggtccaggatgagaggctcagagaatattcacatacagctaagatcaagatggaggctggcaactagacagggtaaaggagcattgtgcaggaaggcctttcagcagggcagctagaggtactgtgtcaaaggcctgtcaccttcccaggataatggtgtgaacagataccaggatcctcttgggttccagttcactagggtcacaatgcagagatcatgagagggtccatagaagtctattagttaagaaggcaattgttgaggggtaatgttagctcaatacaaggagtaatcactcatcaaaattagtttctttggcctaaagagttccctgtcttggttaaaactatacgctgatcttccaaaggactgatttggagtcatagcaccaacatcaagtggctcatattctcctgtaactccagctctagggggatctgacatgcttttttgaactctacaaatatctatgctcacacatatatgtacccacacagagacatactctgacatacacatgtttaaaaataaaaataaatcttaagaaaaagtagagtatcttctctttatgttttcattttaacagcccacgaccctcccaattctgctacttcattctaccctcagcatttaccatgctaacaaatgctctcatacatttgagagagtcgcaggcatttccccctgagtacctacccatagacatctatgcttttctcagcacttggctgaaggatcatctggtgatatcttgatatctgaggtacagttctcagacccatttgtgatctttaatctctaaggccatagtcttaatgcaaatgttagatctgtcctcaaacaaaaaacatacgtgcattggaaatgctcacatatatgcttgtgtaactgtaacagaaggctatggactgggttaaaaactagagataaagaaaatatggcgatttgacagaagaccatgtatgtacatggatgttggaagggtggattgagagggagggaggcatcacactacagaacagttttcagaagctgcggggaaagacaatgatgtcctcactgttccaagcacactgctgctccttctgcttcactacatatggcttcctcggagtgcaggggatctcctctttcttcgtccatgctttcatagcagaggtgcagttatgaggcattaggagctattgcctcgtgctattacacacactattgagtctgattctcatagtgctttaaaaaataatatctcctaattttaagtccagcagggtttgcttagtctctcattcagtgaacttcttcatccttttccacttaatctgttccttatatcacatctactctgtgtttactttgtgtttattatgctccatgctacaataacagctacacatgggacgaaaaagaaaataaaagaaggagggaaagaaggaaggaaggaaggaaggaaggaaggaaggaaggaaggaaggaaggaaggaaggaagaaagggagtgagggaggagagaggtaggaagagagagagaaaggaagaaagggaggaaggaaaatggaaagaaggagtaaatgagtaaatgaatgcatatttaatttcagatggggaatgggagtggcttattaaactggggattcatttatatgaagaatttaggaagttatcactctgacggaacatttcacaagtgacatagccagacacactgacccttttacttctgtttagcattcactttattatgccaggagctgtactaaaagacctccacccagctgatcttctcagacgccatttgagaagtgtcttgattatctgtattttatacatgtgggcgccaaagcttggagatgtttacctgctttttcagacttgtgctggaaataagtgtgggcctgagcattccagccagagcgtctcagaatgccacatcctgtgacctgtttccctgcaagagaaatcccagcgctctgcattcagcctctttccctatgggatgagagaggctaaagggctcctcactgtgctctgcggaagcctcagagctcctttgagccaggctgtgtgtgtatgtaatcccacattggtttccaagagaataattctacctgcttctgatttataaattagtctgcaatagagtaattttgtgtaagaattatgaactccttacagtaaagttgaaaactggcatgaatttttagagatactcttctaggacattcagagcagacttgtgtgggacttgagtatcactaagaaagttgctttaggagttgttataagtgatctgtccataacaacagcaatgaaagcagcaaggacacattgttcacaaatactagcttgagcagtttgcaatattaacacattcactctcacagcagccccacgagataggttcatctgccaaatgaggagcttgaagctcccagatgtggaatgagagtctcagtttaagccacaagaccaggaattaagcctaagctgcagggttccagaatctgcgtactgtcatctcttgacctaaaaatggggagttgaatatttcatgtcactaggctcaaggtaaaagttagagtcaataaaatgctccaccttggcaacggcatccccatgtcacgtgcatctccatgcacatgacagacttgggccacctacaggacctgttatttctcttcaagcctctcctctgagtctcactgagtattgttggtgatataatattacttagaaggaaaattcaatttacaactgatatccttggatctgacatagctgttttatataactaatttttttggcaaactaactgttgcttgctcatcttaatgaatgaagccaacactaacagtagccaggggatagcagtgtcataagttgatgctaagaacacatgcttattttgtcataagtgaaaggcatagcctttggatggtttcttcaccaaatgttaatgccaatggttaaaaaccatgcaggaccgtacttctcagtctgtgggtcacaaccctttgtgggactgaacaacttttttacaggggttgcatgatatgattagaaaacatagatatttatattacagtccataactagaaaaattacagttataaaatagcaacaaaaatattttatggctggcatcaccatagcatgagaaattatattaaaggattgagatattaggaaggttgagaaccactgtgatctaaaagaatcatgacttctataccccatataggcttcagctcaacacattctgacccacagcattagaagttttgttcataccaaatgttcctaagagggcttaaccaatgtagttctataatactgttgtgatacggtaagatttcggataaattggattttctgctcatcctcaacagcattgtcctttttgaaaggaaacttctgaatctgctgtgtttcttcttccttccattaatggccggtctgttctgtgtggggacaccaaagaaagtgagcattccaacagtaaccagggacttgaatcaacataaaccccataccttagtcactaaaatcgcccagaaaagggatgcctaggcaatcactctgccacatttaataacaatgtttataataagatgagtgaggattggttcctgggttttccctggtgccttgtttcctttttttatttattgttactaccttatcaggactcattgtttgtgacttggggctaccacattgggtcctacaaatttgtcttgcttccagtgtgggagctggctcagttgatgtgctcccctctgaatattcctgttgccatcattctagccccaaacatcattctaaccctgatttaggaggttcttatagaataggatcattggtttaatcccaggcattagttctgtcttaagctaccaaaatggcacttccatgttgtggggacttgattgagaatgtatgtttgttttcaatgggttatataataactattttgaaaaaattctcactcatggaaataatgtatacttggcatattttaagaaaactttgctgtgtagactttaggtatgcaacatggatattattgtatattcatatataatcaaataatttctaaagtagaaaaaaattaagatatataccagttcatatagttatgcatgtttttctttgttttgtggcaaaggatattaaaaatctcatcacttatcaggaatcctatatctaataaaatttaatttgcatgcctgaaggtactacatgggttcaggcaagaaaggatcaaaaatagtccttaaagctatattccatggttgtttggttttgtgtgtgtgtgcatgtgtgtgtgatataatattattttgtatatattattgtatgatgtatataatatattatatataaatttaatttaaatacaaaatagatatggttgagaaacaagtgagaacaaacaaaagtggagagaaactttattcttgtcattatcttctaaatcattttgtgtgacaaatatttatatagtgtttacaattaggttttgtaagttttcttgaaaaaacaaaaagcatgtagggggctttatatgtttaaacactattttatttaaagacttaaagcatttgcagattgtgatacccaccaggactgtgggaccagtctccatgttagctctctacacagctcatcctccatgcctgctgcttcatgtcctctgttctatatctgtctacttgtgccccctcttccacaatctcatgatctactggtttactctctatcctatatttttagtcattgtttttaaaaaaatctcaagcataagtgagatactgaagattcagggttttttttttgtgttcctgcattatattgttttggcagatggacttcaggttcatctatagcattatggcaaaagacagtgcctccgtttactgagcaaatggcattctaataaatatatacatatacatatacatatacatatacatatacatatacatatacatatacatatacatatacatatacatatacatatacatatatatatatatgtcttcacaagccccacatattacaaattctgtaatgagccagaagtgtgactagctttatgaggtggtgattaccaaggtcatacgatcttgtgacacattgtttagacctctgcaagatacaatgcaagatacagtagtttccttcatagtttgttccattgaactcaatcccagaaaagaatgtcgttctttcagtacttccctctggaacacatgtgcttccttgagttacaaggaaagcaaaaccatctaaatgatgagtcaacttaattctaccagtttgtctgcctgccctcttggccactttgtccctagttttatgctttctaattcaagaacattagagaattaaaaaaacaaaaaaacaaaaaaaaaaaacaaaaaaaaaacaaaaaaaaacttgcataccataagaaaagtggaatatgtgggagggtggaattcactggagaaatgctatccaatttggatcatgataagttttatatgtgccagatattctgttctgttgaaattataagtgaaaatgacaatatagaaataatgaaaaccttatattcgtcttcagtgggaaacttttgcagtgatagtcaaaaccagtggggaatgaatcattacacatcacaaagtggttgtggcatcataactttcagttaggaactcaaagtgcatgctctttcctgggggaaaatatcgccacagattcaaaatgttgcacacaatgtggatacactcagttgtactaaagatacatgacttcctacaagggacaatgagtcattcccgatgtcatttatataacatgttccaacctactagtaaagcagtctgacaagaaatggagtgacagctgtcacttagcatgtttcatcattgctctgagttagtgtgacctggttcatgtcacaccatcaagagtctttcttcctttatttctccctacatctttgattctcttctgttaaatagctcagtcttggctctttcagaggagaaaatatatcattgtgctatagtgattttttaaaggtaccttcttttaagaatataattttcagcctagggtgtggtggtacaacccttaactgctatttagttaaatccatttacaagggagaagcaggaagatctccaaatctgaggccagctaggtctacaaagtgagttctagcacagccaaggctgcacagagaccttgtcaagagaggggggaggggggagtaatttgcaaaagttacttagagtaacattttggaatcatgaacatgttaaattctgttaagtaagcttactttaaaaaaaactcacataaaaataatgtaaaatgtcatcaacatgaagatcagcctagaagttcgtataaattacttctgggttactttaaaattcttaccatgtccaatttgctgagaaaccgccagactgatttccagagtggttgtacaagcttgcaatcccaccaacaatggaggattgttcctctttctccacatcctcgccagcatctgctgtcacctgaatttttcatcttagccattctgactggtgtgaggtggaatctcagggttgttttgatttgcatttccctgatgattaaggatgttgaacattttttcaggtgcttctctgccattcggtattcctcaggtgagaattctttgcttagctcagagcacaattttttaatggggtaatttgattttctggagtccaccttcttgagttctttatatatattggatattagtcctctatctgatttaggataggtaaagatcctttcccaatctgttggtggcctttttgtcttattgacggtgtcttttgccttacagaagctttgccgtttcatgagatcccatttgccaattctcgatcttacagcacaagccattgctgttctattcaggaatttttcccctgtgccaatatcttcgaggcttttccccactttctcctctataagtttcagtgtctctggctttatgtggagctccttgatccacttagatttgaccttagtacaaggagataagaatggatcaattctcattcttctacatgataaccaccagttgtgccagcaccatttgttgaaaatgctgtcttttttccactgaatggttttagctcccttgttgaagattaagtgaccataggtgtgtgggttcatttctgggtcttctattctattccattggtctacttttctgtaaggatcccgcaatacctctcctgggcatgtatccagaagatgttccaactagtaagaaagaaacatgctccactatgttcatagcagccttatttataatagccagaagctggaaagaacccagatgcccctcaacagaggaatggatacaaaaaatgtggtacatttacacaatggagtactactcagctattaaaaagaatgaatttatgaaattcctaggcaaatggttggacctggagggcatcatcctgagtgaggtaacataatcacaaaagaactcaaatgatatgtactcactgataagtggatattagcccagaaaattagtatacccgagatataagagacaatttgtaaaagacataaaattgaagaagaacaaagaccaaagtgtggacactttgccccttcttaatattggaaacaatcacccatggaaggaattacagagacaatgtttggagcggagacaaaaggatggaccatctagagactgccatatccagggatccatcccataattagcctccaaaccctgacaccattgcatacactagcaagattttgctgaaaggaccctgatatagctagctgtctcttgtgagactacgccggggcctagcaaacacataggtggatgctcacagtcagctattggatggatcacagggcccccaatggaggagctagaaaaaatacccaaggagctaaagggaactgcaaccctataggtggaacaacattatgaactaaccagtaccctggagctcttgactctagctgcatatgtatcaaacgatggcctagtcagccatcactggagagagaggcccattggacttgcaaactttatatgccccagtacaggggaacgccagggccaaaaagtaggagtaggtgggtaggggagttgggggggagggcataggggacttttgggatagcattggaaatgtaaatgaggaaaatacctaattaaaaaaaaaggagttagaaaaaaaattcttttcaggtgggcgtggtggttcacgcctttaatcccaccacttgggaggtagaggcaggtggatttctcagttcaaggccagcctggtctacacagtgagttccagtacagccagggctacacagaaaaaccctgtcttgaaaaaatcaaaaccaaaccaaaccaaaacaaaacaaaacaaaacaagcaaaacaaataaaattcttttcagatttatttaattttatgtgtttgaatatctacatgtatgtaatgtgcactacacaaatgtctggggtccacagagtcagaggaatgtatcaaacctctggaactgaaattactggtggctgtgagctacctttgaatgctgggaaccaaacctgggtcatctgcaagggcaagtgcccttaaacactgaatcagcttcatgaatagttttgtcagcacatatttgaaaattacttttgtgtgcccatgtacatgagtgcatgtaccagaacacacatgggaagtttgaggacaacttgtgagaggcatgttgtccttttctgccatgagtcctgggagttgagttcaggctgtcaagtttggcaacaagcacctttaccactgttttatcttgatgcctccctcccaagtgtctgtataatactcaaaccatttttctgattctatttccacaagtatccatttgcctgtatcttgatattccttaaatatttggttctcttgctcggtctttttgttagcacaggaaaggaatttacccaatcttgacctttatagctggcctttctgtgtgtctcatcactttcatttaaaccaaattttagaggtaaaatctataggagagatgcacctgactagaggggtaattagggaaagccacaatcataattactaagttacattctctggagggacatgaaaacttgtcctgtctctttaatgaacaggttattaatccccttaacaattttcccctttagactagaggtatttcatgaatttttgcttggtaaaatacttctaaggtgagacttaagccataatgtgcagattatggaaatgttgttcattaactagagggcgagatttctagaaagccacagtgctgcttcacaacatgtaacccccattaaaggcttcatctgaatgtttattcattgagcactaaacgtttattattatatgttttattgaaacataaattaaagaacagtaattaggtgcagggcaaacagtaaagcagtgtgaatctgaacagaaaatgagtgagacaaggaaaaatgtcgtccctctttcatttgcatccaattcctttattgtaacctcagcagaaaaatggaggaactaactctctagatttatgcttctatatggcatgtttacatggttttagtattctgtctactaaagagttaatctttgaaggtcagaaacaagctggttttcttatgttttgaaagggagccatgatagatgttaggaaagtcggtgctgaacaattagtaggtcccttgacaattcttgattataagactgtagtcctactgattatggaatgaggtgttgctccagacacagggcatgcatgaggagttctaaaaataaagattgcatactgaaggaaaggccatccagagactgccccacctgggtatccatcccatatagagtcaccaaacccagatgctattatggatgctgggaagtgcttgctgatggaagcctgataggactgtcttctgagaggttctgccagagcctaacaaatacagaggtggatgctctcagccaaccattggactgagcagggtgggggtgggggtcccccgatggaggagttggattagggacggaaggagctgagggggtttgcagccccatggagggagcaacagtgtcaacaggccaggccccccagagatgctggggactggaccaccagccaaagaatacacatggagggacccatggcactggctacatatgtggcagaggatggccttgttggacatcagtgagaggataggctcttgggcctgaaggtgttcgataccctagtatagaggaatgccagggtgggaagatgggagtggttgggtgggtgggagagcacactcatagaggcagggaagggggtgggggatgggatggggtattagaaggggagacctgggaaagcagaaaacatttgaaatataaataaagaaaatatccaattaaaaaataaaaaattaaattaaaaaaagattgcacagagaaagacatcagagtggtattttggtgggtaaatgttctttggcacagaggaatgaatgatatgtgtattgtcttcacagtggctttctttaggccatatccttgtatgatcaggaactctcaagaagagggaaggacatgtatggccaagaaattcagacataaatatgttaatttttatatacgctaagaagtcaggagtactgtagtaagccttattaatttttccatttatctaattacttacctacttatatattcattcatttttccttttgtcttctaccactcttcccatttatttatccctccattaatctatctcacattgacctatcccaataatacttaataaatatgttctttaatgtaggagcatggaatgggaatcagggaaatttcagaagaaaactgcaataccgaatatcccagaattctaaaataatggaaaataatggaagataatgatgtgtggggttttttttttaactctataggtaaagctgtcatccacatggatagtatcagaggatccaaggagagtcaaaaagcatctgaggagccctagagaatctaaagcttgaattggaggccaatttggaagggctcttaaaagattagggcaagaggaagagaagggataagaaaggcattttacagggatggaattttaattttaattaccaaaactcaaaaccatcagaaatacagtgattacaatgtcaagtgatgaagtcatgttctctggattcttgaatgtcactctcctaatggtaacactcagaccttccacaaaagcaaacagagcatattgccacagaggactgtgagcgtatgcgttctggctgaacagggagactctttaaaatatcttacccagattctacctctgttgtcacatgagcataacccaatatgcatatatatgtatatatgtatatatatatatatgtatatatatatatatgactaagcataattcttcccatttcaataatagctaataaaagtaattttgaatgatggatatatgaattccaattttcctacgcatgtatagatgaggttttttacctaatagaaggaacattttcaactatatacctctctatagagaagaaaagatacagatttgatgacttcatttaatagcttgtgcgagaacccagtctttccagatgtaaaacctgcctcattcacatcattcagttggcaacctcaaagtaataagtgatgcaccttaccatgagtctatgactcctaatacatattagtcctctgttataaaataaaaggagcctcaaccattttgagataggcaatggttagaagtagatgccaaatctataatagtttgagagttagaatccactgaaggaagacaagcaaatgatcaactggaggcaagataataagaaaggagactgttaatttcttacacccagatgttcctctccacatggcattatctctaccactgcttggtcctttaatatacatggtgaaggaatgcagaaaatgccactggaaatataattgtctttcagtgtcaccattagtgtctattaccaaacagtagggagattttcatattgttctgcctattgcgatgaaaatttaagcaaggggagagaatgttctcccaacacctgttttcctaattgatagtaattactctgagcacacgccccaagagcacgtaggtcttaatctaagtgggtgcattctcataaagccacattacttcctcataagctgtattactatcttattaacatattaaaagaggacaggtgacagaactgcgacagtagctcccatgtctgcctctagatgagaagtctgtatattattctcctttagtgctctcattcactgtcagaacgtcttatgtcttacagacaaatgtttaaaaaaaaaatccatttctaccctgtttagagactgagagaaatagtttaggaagttgctctactttttgtcagttctttttgctttgctttgttttagatttcagaagagcttcttggagcaaagaaaacagaaacgatctccctagatttagccagtgccccatcacggcatctcctgctaggcagtgattaggaaggtgatgagtggcttgtgcttacaatatggaagacggggaaattgattggcaaaatagatgcactgacacttgttcctgttttttggggaccctagacttttgttcttatggacaagtgtttaaaaaagagagcttgccagtcattcatcctcctgagcttgaagtcaaaaggcaatggcaggttggcaggctctaggacttgggtggctctatataacatcacattccctgccttgcttttatctggcttgaaaagaccttgatttttagaaaatttgaaatttaaaactgtcgggttgctaaaagctcctttaaatgctcattgtggctcagagcaatacatcatcgcatctgtggtgctcagatgatgtacagagcccatatatcaagagagtgccatccctctcatgatgtatgattataactcaccactggagcacggctagtgatgtatagcctaaaaacacaattgttaagccacaaaactctataggggctccacaaatcctgcaaggtttttttgcttgcttattttcttttttaactgaattggttctttatcctttttccttaagtttctcagtttgactgagacagttggaatacatagacaactctctatcccatgttttgttaaaggcaacctagctgtctgagcatcatccatattctcaatgaaagagctctgggcagtagagctcagaagccatttatatgtcttcatgtacacctttgagttttgacagctcactgctttgactcctcaattggtcatgctaatgtgttctgcaagctctgtgaacgacatcatttctagtgacatttatttttcaatgaagtggctcttggtgatgtcatgctgaccctagctagacttctattgagataatgcttggggtgaggtgtcactctttaccctcaaggcaaaggaaacagatgtgttaaactatttatatgcatccatgaacactcttcaaccaatatgtaaatagcctgcttctctcacccttggagtgggagtcatgtatacatgatttatactatgtcctcaagttctcccatgggacacaacttgtcactcacagaagtaattcatttgataatgattcatttactggctatccttcctatcttttttaccacaacccctgacttatatgtttagtgatcacttttccaataggccacttgtaattccaccccattcctaagtatgtttcaggtccatagcgacaaagaaaagtatttatattgttgtttctaaggaaaatgaaattttaccactgagagaatcatgagaataactggatactcttgatttttttttcttctgagagtttttctgtcttctctgtattttccatgctccaaatgtgttagtttgatgatcaaaaaaattgaaaaactttattatgtaaatatagttgccttttcccatttgagagcgtttgatgatttttcaagtttcatgagaaacataatatacatgaagccttacctaaatcttactgtagaaaacttgtctgatttgctaaatgtatgaaactcaagaagaatgaagaccaaagtgtggacactgtgccccttcttagaattgggaacaaaacacccatggaaggaattacagagaaaaagtttggagctgtgacgaaaggatggaccatctagagactgtcatatccagggatccaacccataatcagcttccaaacactgacaccattgcatacactagcaagattttgctgaaaggacccagatatagctgtctcatgtgagactatgccggggcctagcaaacacagaagtggatgctcacagtcagctaatggatggatcatagggctcccaatggaggagctagagaaagtagccaaggagctaaagggatctgcaaccctataggtggaacaacattatgaactaaccagtaccccggagctcttgactctagctgcatatgtatcaaaagatggcctagtcggccaaaactggaaagagaggcccattggacaacaaactttatatgccccagtacaggggaacgccagggccaaaaaaaatgggaatgggtgggtagggaagtggtgggggggaggttatgggggacttttgggatagcattggaaatgtaattgaggaaaatatgtaataaaaaatattttaaaaaaagagacaagtgttataaaaaaaaataaaagaaaacttgtctgaccttctttacctacacaatcaatagactcatgttgtactctatagaaatattgtgctgataaaaagaaacaatatgtaaagtgtctagaaaatcaggtcatatatattcaggtcatgtatatttcttttgtattggctatttatttgtgtaggtggaggtctcatttccctaattggttcttgattatgtcaataaagatggaagaaagccgggcagtggtggcacatgcctttaatcccagcacttgggaggcaaaggcaggcagatctctgagttctaggccagcctagtctacagagtgagtaccaggatagccaagactacacagagaaaaccaaacaacaacaacaaaaaaaagaagccaattgctgccaattgctgggtaaggaaaaaagatgagatttccgggtcccaggaggaagagatagggacaagatgggatgggggttggggggtccaccagagtaagacacattttgcagaatagtcagctactggttttgtcaagacagggacagtggccctttaactttctgcataataagtctgtcagatagatgatccttggccataatgccagagatagatgctcttggattctaaaaaatgggggactgttcagatagtcagctgtctttacattggcttagttttggaagctatgtttagtgattcctatatttttaggtaatattttgtcattctatgatttctgatggggttgaagactagttttagtctcataatcaaactcaagtagcttaacatagagtttatacagtagaagacatggttttcaagtgatgttacaggcaaaaattctaaacataatctagggatggaatcataattctttcagttaggaaatatggtagagtactttatctaaattgacaaattgatggactggatgtcatttgtatttcatactgtataatttacttgtcatgattttaagaagagggtttttaattttttttattggacaaaaaaggtgtgatgtaggtggagatgtcatttccctaattggttcttgactgaatcagtaagatggtggaagctaattgcctggtgaaggggaaaatgtgggacttctggatcccaggaggaaaaggaaaggacagatagatgggggagggaggggttcggccaggcttttagaagaggaacaggaatgatgtatggcctgggagcatttagaactggtagtggcctctgccagcagtgaaattctgatataagatagctgatgagtttagagcaatagattctttgcccagccattgagttatctggctagctttaaatattaaagctgtatggtatttttcattaacagcattaaagtgggctggaagaaaacacaactggggcagaatttagggggctttggaatgggaggatttggcaaaggacagagctacagggtagaggtaaaccaaaaccaagtggagcacaggctgtcaggagatcgatctcattgttcttgcttggcaaatccagtcaggataaagaaataaataggtggagcatgggctggtgagaacacagctcagaggaaggacctagtgtaattttacaattatacacaacatatttgtttttgtttctttgttgttgattttttcattgtcatgaccaaatactttaaagaaacaagttagaaaaaaaaatgattgctcttcttgtttctaagattttagtccatagtaatctgatccctctgtttctggaccatagtgagaaagaacttaatgtgaagaggttatgaagctgtagaattgttcacttcttggaagctaggaattagcagcaaagactttcatgggacaagaaaaggcagactcccagtgacatacttcctccaaggatgccctaatcctaaggattcatcacttcttaataatatcataagaacatgaattaatccaatgatgaagtcatagcccttgtaaatcaacaactctgaaaaaagatttctatttgctgagtctttaatgcaagagctttggggcatatgcaaaccataataccaaggtagtagattactgctatgagtaatttggtagcccagtgatcagccttttgaggaaatccatagtatgtccagagcaggatcaaagtttatattcccaccaatttatacaaagttcctatttctcatcttccctcccactctttgtaattgcctctctcttattaaagttacctgtctctagagaaggaagtggtctctcattgtggtttgggattgaagctgttaagcatcttttcctcgtcatttttatgtttcttttttgagaaaatgtttacattttctgcccatttaagctaaagatatcttcattttactcttgacttataagagttcttcatgtattctaaatacaagtcccttttcagatatacgatatgaaaatctttctaccatctgtggtttggcttctcattttcttaattacactctttgggtcacaaggtgagaattttgatgatatttagtgacttctcctttgaatgtctcctgtgatgacactgagccaagccaggtaatctagggtagattttctattcaggatcagcttgtaagcaacctcaattcatatgcatccttaattttccctgtcctgtaatctactatattcacaggaccaggattaaagtgtaagcatctttgaggaagatattatctttccccctacttttggggccagcctgtggctctcatgtcggggttcgagcctgggaggcaactggagctgaaaaagaagagggaatctagtcgggtagagaaataatggaaccaagacaagctagtctgctcaaggttcaaatgtttaataataaaatttgcgcttataaagagggaagcccattcccagtcacaccaagtttcttgatgtagagatgtgaagttgtcagaacagccttttagcagaaactcgccaaattcacagtctgtagtaaactcccggaaaatcttgaagaaccagttcagcctcagggcaggtggcaggcagtgtaacatcaaaggagagtgatgagaagcagtacagcaggtgaccccatctcagtggtgtatggtctgaaccagcctatctaggctgaaggaggttacaccctacagcattatttttattattctttacaacccaagttttccttctatcaccattcataggctagtgttgaagagaggggttcacacaagttctcacaactgggggggggggtgcaggtagccaagtagaaaggatgctatccctcttatgcctctcatgaaccttttctctgcaattgttattttccctgcagttgaattatgatatagtttaacaagaaaaaggcacattattttgattgcactgacaatcctcacgtgatgtatgcttgtgtgggaaaatgatggaaggagcagtacagcagaaaaggtgatgctattgcagttgtctctccacttctgccattcctatcaacacctctaatgagatagaactcatacacttcacactgttacagtaaaaaaaatgctgtgggctttaatatattcaaaaagttgtgagaccatcactactatgtgacactagaaaagaaaacatcagtcactccccaaataaaccccatttcccttggcagacactcttcattgtgctcccggaaacactgatctttctctgtgaatttgcctagtctggacatttcataaatggtatcgtgcaataaatggccattcggatctgagccctttcacttagcataatgctttccttagcagctccattcgtctttatgcccaatcatcttctgctgtcttgttagtatggcattcatcagttgatagtcattttggattgtttccactttttgatgattgtgaataatattgctataaatatacattacaaggttttgtgcctacatggtttcagttctcatgtgtatatactgggaatataattttgggtcatttggtggctggatgtttaacattttgaggaattgccaagctgtttttcaaacatacagctgcatcattttgcactctgtgcagaagtgttctaggcttctatggctccatagtcgcccccacacttgcccttgtctatccttttgattaaagccatccgggtggatgtgaagtggtgtctctgtgtggttttgattggcatttcactaatgactaataccattgagtaatcatgagctttgcatagttgtctttccagtttcactgaaaccagttcaagcattcaacaacagtgaacactattgatgattccctctttcttgaattcttccttttctagggttctggaacttgccatctcttggtttatacacatatcatgttggtaggttgagccatccttctttacaagaactgagttggctctgtcatgatttctctgtcctgggagactgagcggattgtcagaatcctgtaattaggctgtcacttaagaggttatatcactgtatcgtgtatcaggaagagctgagatcatgcccttagggaaaaatcacctagacagtgagttgtttactgtctttggtgtcatagcaagtttcaaatggttgccaatgatcaagagcgtcatttccagaactgaatagtaacagcatatagaaatagctctgatgagtgaactcaggagagcaagatatagaacaggaatcagagacaaatccagatccgaagtcactggcatcgtcttaagtacagacataaagcagttcaggaagcctgggcaacttatggaaataggtgtctacataacactacagggcagtccaaacaaagtgttaaactcagtgttcaacataagtgcctttcataggggtaggccttagtcaatgtctctcaaagtatgaccctagaccagcattacttgggaatctattagaaagtaagttaggaggctcttaatttttagcacgagctagctttttaatgcagtttgagaaacacttgtcagagcatcagaaacacattctggcagaaagagatgctttaactgcacaccagttaaggagcttgggaagtataattcttgcaaatataagaaccagtcattgaatgtgacctctggtcttcagattgcaagttttttaacaataaagacactctcactgtgtctagatatattcaggacaccgtgctaagcagcataacaaacttatgacaaacatgtgcttagatgacttggtactttagacctgtgagatgggaatactgcagtcctccttataaagaagactaggtaactgctgtggagaggtaacacagctagcacatgggaggtccagctgtattggacatactgtactctaggtaaagctgttacttttatatccatatcctcttgcacgttgagtacagaccactgatctggagcttgtgatgattaatatgtaaagaaaattatagagaacaggtaggtgacatcaaggaagacagtacggaaaaggaagtcttgaaaagggagaaaaggaggaaaggaagaaaaaattacagcaagatttgctgctgctgattgagtgggctttcactgagtcctcagcggtttctgctccctgccttctctggtttgatgactaaatccctcagtcactgagcacagtgaatttccacttgggcttgtgttgcatgcctttattttttaaaatttttcctgggtagttcgtcacatacttctccatgtttctttgtgtctgtctccctctctcttcacacacataattggagacttaagtatgcctatgtcccagttgctgaagggttttgggccaggcttccccactgactgctgcacatataggcagaaacatgtcacagtttgggaaaactctactgagggactaacactaagctcctctttattacacccaacatggatagccttgcttgctgcctctcctgcaataacttatcattctctcttcctgatacacaaagccacagatacacttcatggtctgttctctggaggtccatggttacagcccaaacacagtaatcactgtacagtaggcatgactggcaatgtgctttggttctctacttgctttttgtaagcttttccactttccaatctctgcagttgataataaatgaaggaatgttgctcaagggcatgaataaggtttaggtttagagagataaaatagatgccgttggtagaataaaactaagatatcagcttagccttgtcgtatacatgttgaattagatatgctctgagtcctcattaatgatctccccttaataagacagcagtgctttagtagcctagattagggaaatgagggatttaaaagatcaagtgcaggtcagttagatggcttagcaggtaaaggtacttgttgccaaaacttacaacctgagtttaatcccaagaatgtgcaaggtgggagaagagagcatgctgccagttgtcctttgcctttctgatctacacacacacacacacacacacacacacacaatttaatttttaatttttttcaaaagattatattgacagaattatcgggtatgttggtaaagaacaagagaataagagagagtggcatcattttctgtgaggattccaccacattctgtagaactgttgcctgtcctctctgagctgagcattcgtttctccttctgtaaaatggagaacacttcagaaagcaattctaggagtactcaatagaaatctattgggtactaatacaagcattggttgtcacagtcaataagaataaatgaaagcatgtgtattatagttgtgtaattgttattcaatgccattgttcttgagttggcccattctacttcttcctttcactaatttggtattacttatgcactccattgctgaccaggtcttctctcttgtcagttccagaggcacagcagccatctctgaagacatattgtcatttcaaagcacaggttaactacaacccagactgacagtgatgagtaattccatggagcctgaaatggactctggcatttccctcaaactcccatatgcctccaagttgttccctcttgctttgtgcttctttcttctcaacaggtttcagatgtaatttctgaaggtgaacatcatcttcttctgaaaaataatccagcaagaagcaatggacagtaattggcctccaggaaagcatcactgtcaagtcaaaatatagaagtagaattaaacacatttttttcctttcttttatatttcagcatgtacatgtccacgttcttcccaggaaggcaggggacttcccccggaatgacaacatctatgatgaggtaagtctgtcttttgtgactttattatttgatcacaaggcctgtcaatggataaaatcaacccaattaaccatatgtcaccccagatggaatcttaaatggtcttctacccagtaaaacttggaaagtgacagtagaagctaacaagggaagagtgaccaccaggagaatctaaaaataaatgaattattatttttttactactagtgaaacccaatatcaagccaagtggccttatgatttctgctctgtcatggttactagggcacttaatacctgtgtaaagacataatcctgaatctccatagacaatacaaactgttaaaagtagaaatcaaacagagggacatataattctttaagacgaatatgctaacattggaagctggagaaatggcacagtggataacttacttgtcctagaagcatgggaaactgagtttggctccccagaacccgtatacaaagataagaatagcagtgcatgcatgtattaacaaaattaactaataacgaaatggttatgaaggagatgggcaatccctggagctcattggccagctactgtagctaaatcagtgagctccagggccagggagaccctagctgaagaaaaacaaatggaaaagtgatggagaaagatattcagtgccaacctccagcatatgtacatacatatgcaagtatactaacatttacacacatatacaccatacaattacaaaaacattctgcctttgcacttagcacacctgtagactctctccaaagagcacatattcaaagtgaaactttgagttatccttaacagaaactacattgatttaaataacatatgtgtgtcttgaatctcctgaacattttagaagttgtgtgatttttggatctatccatccaatgataccaatgtcaaatcaatcctacatgaaccatcaagggctatgcaatcacctctagggtcctagccacaggagagccttccagtgtctgcttatgctgtgtggaacacagcctatggtagaataagttagaagaaaatgtaaaatgatgtctgtttacatattacctataaccaacgaatacaaaatctggtcagatagtgcccgtgctgtagagcatttgtattaaaagcactttggttgtaacaaggaaagatgtatggatcaattaacaatgtctgccttggtgtcaaatagaacaagcagattttagtcatatatttgatactctacttccagacctttggaatcaatttccatttttatctctaattttggttgtttatcatgtgtttctgctaactatatgaagatctctagctggtccctagggagcatgtatattatacatctctgtgtacattcataggatttttcctgattaactgggcattaaaatggctaccttagcactgaaaataaaaaaaaaaaaattaaaaaaaaaaaaaaacaaaaacaggaagttggtattaaataagaaaattcttccatgactctcctgggacttagtgggtcttttgatgacctttctaatacttgcagtagacttgtgtagggtggacaccctctagccagtcgttttgtgtggtggtttgtgacctagtgactgaaactcttatttctcagggttatctgtgatatattgtgtttgagtagatggaaaaggcacagggaacaattattacatgtattaaaaccgtctcaggtgattctgatgcagatctatgtgtaggagcaggtgctgtctaaaaccccagcttcccaaaaacctctaaacactctaatattaagtcagttttagcagatgtagaacacaggttgggcattgataatgacttagtctgtgtggtaagaaaatcagagttacaggatcattgtatacagagatatatttaaaacacaagtataaagcatattaacgtaaaccaaggttaataaaatgttgccaagtacaggttatcttaatgaataagttaccacatgatttatatacaagtgtatgctgctggagtagtatttaaagtgcttgaaaacactgcttccttaggctgatcagtcaccttgaatcttgtttatgctccaaatgtgctattgacagaagctgtgtggctgcatttcagttctatagaagacacaatggctaacattgcacagcacatggcctttctctcctctaatactcctttgcccttcctgcatgctctagtggcatctcttgactcacaaataaaacaatacacatgccaatgttccatgtatctcctctgtatgaaaaagtaatttccataaaaatggattttcaggcaagagtagcttataatatagagagatagaggtacaagactagaaagcgcctgaacaacagaatcaagtccattgcaacctactgaggaggtgacagtcaatattttcacttggcttccatgtcttaatgttctcatctttaaaatggatagtgtattcgccttcaaaacctgggctcgagtattatgtgatatacatatcctcaaagcagattcaggggttgatatgcacgtgttaattttgcctttgaacatatatagagggtaagtaataagaaccccaatttcaagccaggttgttggatgtcctcatttagtaccattttccagagtgaataaaacacagtgtttccaattttctttctgcccttagctactcagactcagtttaatcttcctctttgtttgagaatcttctctcgcttaagtacataataaagcaatgtctagcaagaggcacggggagcatgacgcactgggcaggcattattggtacacgatgtaatatacattagactgagtgatcttaatcagaaatgatagggtgatgaggggtgacattttttatactgatgaaatcactcactgtggattatgtatatcccagtgacataacaaacaggctgtcttgaaggcagatgggtgggaaatagaaacagcaagaaaaagagctcagtgaacgtattgtactcctactacggcagtcttatagaggcttccctaaagaagtcctagattaacttatgtcataaaattatattctttgtgagcacaattttaatgtagccagtgatgactggagaagctccacagaaggggtgcaagatgacaagttctagaaacagagaaaagggaggaaagttgatgaggaagatttgtaaaagaagacaaagacactgtttctaaatatctagcattctggaaaaaaaaggttaaagggcactaatcatgctctatgtggaattaatatgtctcatgcagtctctaaggaaaagatctagcagaatcaggctgcaaggaggcaggtgtgaacaccaaaaaagaatagatcaaaggaccagtcctatctgtggatcagttcagctcatggttgcttggaatcatgtgagcaattggtacagagaccacatggttctgcatccctgtctttctacacctggcctcttctctcatttatctccccttgtagatgcttcaagctttgtaacaaatagtgtctttttcttagtattgtggcatttgagcaagtgcctcacaaaaccttcctcttttgtttagttcttagaaatagaagaagtagacttttttgacttttatgagactatcttctatcgattttttccacttgcagcctcttccttccttttctaactcagcattgcatattgatgatctgtgagctggcttgcttccttgagtgtgttttgtcattccctgcaaagtactttttaatgctgtgcttcgtgtttgtctgaaaagtactttttaatgagatggaatgttgctacacatgtcactcatgctgtaggtcagcagaactcagacaattctgtctcttacatacactgacatccctcacatgggccatgtctatgtatctttacagggttccctcacactgagcattaaagtcttccccataaatacagaatgagagaggtcaacatgaacagggctggttccaaagccttttaagtttgaactcctgtcccagtccatctcttgtctctaccattcaagtgttacttctctcaggtacacccgccaggatcagcacttcatgcagacgagctgtattatctgtttctctttcctgtttgtttgtttatttacaatattgtggcccaaaggaatttcttcagccacaatgttgggcttttcccacttctatgccagcaaaaagtctccttcacctatagcttgcttttgccaaactagcattggttcccctacctcagagcctttgtacaaatcgttttctgcttacaatatctgatatcaggtccccttcatgtaggtttgtgtgtttaaccaaatcataggtcaagctcacctcctacaagagcccttcttccttctcttcctatatatagctaaaataaccagccttctgtccttactcaagtagctccttcttattaggatgcctgttacatccttaaaaactcactcaagataattattagtttatatgcaacactggcatctctcgagtgcattgtaaaaccttgggatcagggacctagtctggtatagggtggttccacagtgaatatctcttaactagttgcacatatgacaggataagagtcacacttaaagaactcaaaattccctacaagttgaaacataatttacacagagggtatcttgctttcagggtgttgattcattaactccggattacattgaatgtgagcataacatggtgctctcatccatctaatttgatggggcattgatggaacagaatcctttggtcagaaatcagtgcgctgcagaaggcctgaaaagtgaagtccaccagaaaggttctgagaagcaattagaagccttttctgattgctaagcaagtctggtagacttcatcaaggacgataaggaactttcccccttgaaacctagatctgtctgcctggaacatatatagttgtgggttttgtggaaagcaagctggagagccactctgcctctcattctgactttattatcaccttgggattcatctccccttcttctccctcaagttccatgccttggacttgtccttacatattttactcacccttccagctaccacatttcagagcatgagcctttcccctcaaatgagtgtaaactccaccctttctaaagcatatagacctcccccaacttttactactctccatacatatgtgggcaccccacaaactcttcatttcattttcttagaacttgaatataaggccttctctgaactcttcaggacctctattatcttgacacattgattacgattatgatgatggcataaatagtttcttggataggggagtgcctattgcttaatgccatggtatatcattgaattggctcagttaagacttgtcctgactgtgtttcaaataagcaaaagtcataactggattggccaattcatcagatgttcatgggtgacattgaatgtttatgattgtgtgctatgtataaaatccattgctttgttttgttttgttttttaaagagtgcttaatattaaagcaaaggggaattgcaatcagcaattcaaaaaatgtaaccgtgaactttatagacagagcaaccatgagttcaagcgtctcttggaaaataattgcttggcttaacacaatgcatgaacaaaatcaatttacacaaattcaggtcatttggcccccgagggcttaagaaaacattctattgctgatgatatttattgttgaaattggatctctttcacacatcatttgatgatgtactcaaagcccatggattccctagttgattttgtaaagaggaaggaatgtttcagagagacagttaattagctgttctccctctgggtttactgatctcttcctagtgatcgctaagcttctgagttcatgagaaccttagaatggcacctgatcataaaaaggcagttttatgtttttcctgcactctttggtaaaagaatctgaataggataagagcatagtcattcttaattaaatgatacgcccacatatgctctctatatgcttctatgaatgttctttgactacctaacttaagaggcatggactacgtttccatgtcacattattatcctactaaatctttataatccctcacagaagaagataaaattagaaaaaaatgatttatcaggttaaaaattatttctgctcccttttccttataaaaacgaatattagagaaaatcaggttggctttatgtttgctagtgcttactaagcatagtaaaaaagcaaaatagagaaatgatgatggtggtgatggtgatgataatgatgatgatgatatgatgatgatgatgggttggggactgtcttagctagggttttactgctgtaaagagacaacacagctaaggtaactcttctaagggataacatctaactggggccagcttagaggttcagaggtttgattcattacaatcaaggtgaaagcacagcagtgtctaggcagacatggtgctagaggagctgaaagttttagatcttgttctgaaggcaaataagagaagactggcttccaggcagctagcaggaaggtctctcaaagcccaccctccacagtgacacacttcctccaacatggccatacctcctaagagtgccattccctgggccaaacatattcagatcaccacaaggagctccaaagacaatcatgaattcactacatcaaaggatcagatcatcaaaagaaaacaggatacacaactggtgagaatcatgtatgagccctatagcaaaagacacaacttctatgaagtctttatttttcttattagaatttactttaatagatgtcacaaaaggtcaatttttttctcaatttttttctgctatgtcacttgagtatcttcagttgcttgttagtcatgtataaacaagaataatgtgaatcacatggcacttgatgtatgacatttatggcaaaagctcttctttaaagctccctcatcgtttcctgaataagattttgctgtgcagagtcccatatgatcttcatggtaaactcagtccctagacataccctacagtacagctagaaggtccctggtagtgaagatgaaaaatgcctgctctgaggcactcttgttgctggtgttcctctgtcttctctcatgcttctcacaaggcaatcctttcatctcactgcgatggctatagttaagcacccataaggtatggtgcctaaagaatgggctatgtgtgttccaaatataaaaaaataaaaaagtcatttggcttatattcaatgttctttacataaataataataaattatcacttaagattaaatattttggcattttggatatctatgatgcaataaggcaaattaccaagcaaaaattcttctgaatccataatatttagatgattgagaatgtaggcctcaggcaagagaaaaagttgctctagtaataatttaagagcccaaacaggtaaataatgcagagggaagagagacattaattaataattaatatatttttataagtggaaattattatggcctcaaagagaaaagatcccaagtatttgacctactctcttgaaataacaagaaatgagcaagaattatggagagtggagaaaataaagttagttatattttaaagaatttataaattattttgctttttggctatcagttgacaatctcttgatgaagtattcatatacttcaaataagctttataatcaatgccattacctctttattggaactggatatattgttggaattcatgcatagcttgccagcacaggggcatcatagtgctgtcacagttttgcttttgttaccacaaggtggtatccaccatggatgtccccagtccccaatcagtgctcaagaggagacatctaagtgtatttatagacattttagattaagaaagattttttaaaaaggatgtgaacttaaatttaatagtagagtttttaaccaaaaacaaccagaaggctatcattttagtacatagacactataaaatagtactaatacaatatttatattctcttgtggcaaaagtctttgaagccctgtatgtattatatattcccaaaacatgtcagttcatattaggcacaggtggtgggtgagtaccaaattaaatagttctagagttgtttaaacccggatatgatgatgatgatgatggtgatggtgatgatgaagaagatgaacttaaatctgcttatatttcatcctgcctatctaaatccagaagaccatgctgtgtttttcatcatatcaaatgattgagctagaggttagtgtctcttatcaaagatcttgttagaattttaaaaatgaaatgacaagtcagattgatatatggaaggtacattcatttttctgcctgtttgttgtcagtcctaccagggataatcatgagatgatccaaggactttgtggaaggagaggcattgtttgagtcattatttctgctgacaatcacctttgaaatgggtggcctagttggctgaaatttctcattcacttttggaaggagatgcaatgttcttctgtagtaaaatcatgtaagattaagggtggagatccagatccaacttgcctggtgctcagttcatattccatgtacttggaaagccagcttttccatgtctcaggtttttttcatctataaaatatatgtgggttgctatgcaaatcgaatggtttcctatgtatgaagcctgaagatacacaagaaatgctcaataaatattcactataataatttgcacgaccattaatagtattactattatcctgacagagcctgttgtgaagagctgtagagtgagtttggtaggtgacagatcagaggtcatcttctgtcttcacagcactcatctgagaaatttctgttaccatgtgcatgtggaatgtaagccttcaatgacaatcatctgtgagcacattaactttccaacagtctcaagcagggaacctgcaggatcctgttatttaaacacgaaaaggaaatctcttctgaagagaaaatactgaagtttgttctaggactttcagatcacttcacagaccggcaagcagtgtgttctagaaactgttgagatacaacttcccaacttagaagtacgctttgagaggtgccggggtttgtgtgtttgttttgttttaattgaaaagggtgaagaaaaggctatgcttatatatctctaaactgtatactgagcttactacataaatatggggcattgggctctgcacagataggctggtctccagtagagctgaggtctaaccaccggtggtaataattcaccttcatgacatggtaggcattcccttatgctcctggaactctggctcctgcttaagttactgcaccaccaccccctccccacagctcccacaagagaagcatggtcagtagtcacataggcaatggcccaagcttctgaccttcaggctaaactcctccccagttacctagcaacagtaaagaccataaaaggggctgttaggcccccaccttgctcttttacctcttacttatctttctttctgcttgctctcttagttgtctctttcttacccctcactctcaccctctctctttctctctctctctctctctctctctctctctctgtatctctctctgtgtctctatctctctgtctctctctgtctctctctctctctctctctctctgtctctctctctctctctctgtctctctctctctctctccctctctctccctccctttcccctgcctttctataataaagctctaaaaccatagaatgtctctgctcatcaaggcccactgcacttggaggatgggacacgctttctcctaatctcccattagaaggccttcctgtgctccagtcaagatccactgcactcactcttgcaggtgttgggaacctcttccctcatccctctctcctataaccctggtggatttagcaaagtagctccagggctccccaggtagggctgccccttggccaccccctgaagagtgggtcataggcttgaatgcccacccagggctgagtggaaagtatatggcagctctcccatgcttgacagaccagagaataggtaaaattctggggcgtgggtttttcctcccccctcttccacagggcccccctttttagttcccaatatgtaaacatcagtgtctttcatgagatttacttgacaaggagaagggacaagaagccagcatcattaagcttctggattaggttgccagtaatgaacaaatctagctcttagatttttgtcccaagagaagtggtgaagaataaatagagagtaaaattatcatttgatgagccacagtgagctgggctctatgtcaggggattcacatacatcaccctgcctttacaaacatcaaggaaagaagctgaacctcacaagaggaagcatcttttttctttttagttgtgaaaaagctttattattgttgttattgttattatttcctttttaattaattaattttttacactccatattttatcctccacccctgtccaccctccaactgttccatatctcatacctcctcctcaccccctgacccatatggatgtccccactcccaccctacctgacctctaaactccctggggcctccagtctcttgagggttaggtgcatcatctctgaatgaacatagacccacagtcctctactgtatgtatgttgggagcctcatatctgttggtgtatgctgtctgtttggtggtccagtgtttgggagatctcagggggtccagattaattgagactgctggtcctcctacaggattgcccttttcagcttctttcagccttccctaattcaacaacaggggtcagctgcttctgtccattggttgggtgcaaatgtctgcatctgactctttcagctgcttattgggtcttcccaagttcagtcatgctaagtccctttgtgtgagtgctccttagccttagtaatagtgtcaagtgcccatatgaggacacctcagtcccacttgggagggaaaagaaagcaatcacaagtggggagggacggaaggaaggagggaaggagaaacagagagagcaagggagagagggacctggaaggtaaagtggatggagggtggggtaagggggggaaaacctgatctggtattgggtgagtaaaaaagacagaagccctgagagccaacagaaagaatggaaacaggcatcctagggagataggaagttggtaggaccctccagaatgcactagagacctgggaggtgagagactctcaggactccaagggagggaccttagaaaaaaatgaccaacagtagggagagggaccttacagagcccacctccagcaagaagtcagggcatcaaatgagggagagagggccatcccacagtcacaactctgacccataactgttcctgtctgaaagaattacagggatggaaacatagaggaacctgaggaaaaaaagttgcagcaacaggtccaaagtggggtccagcttccttagatccttaatggcaaagcttgtttatacccagaactgttgagtacaccttcgatctttgtttcaccctttgctttggtctttattttcatggaaaaatcaaagattgtgagctaagcaattttcttggctgtgttttctggacacacacacaaaaataccttagatatcgtgtatgccctacaagtcttggatatatccctgctaattaagtatgtaaaaacactgaagaaaatggcattttagaatgttaacagtttgggttttgttgttgtggtggttattgaggttttggttgttgttgttgttgttgttttctgcttttaggatatagctcatgagtttgccagctaaggaacttcattataactcctgtttgcgtaaacacaaggaaatcatcagcatactctagtccagcttctacagttcccaaggtcattctttcgaagctgattttgtgcaccaaacctcttaaatacttttgcatgccttatagtatattcatgtcatgataacacactaaaatatttaaaaggaaattgctgccttattttttctcaaaaagaaacttacaactctcaatgggccataaatatcttctaggccagctgctccagtccccgttggaaatccgccttacagtagaagtaactaagaaactcatagaatattccctttgcactgaacggcagccttgttctagtgcatatacttttcttttggaaaaattttgtttcttcttagactagtcccatcattatcagaagggcattgtatgctgtgtcaagtacactgagaactttctgattgtcttctctggagatcttagccatccctttgtgttaagacccaggttctgttgatgtttctttctcaagcagagaaaagcaaacaaacttgttgcttaattcacctcacatagcatagcaacatgcacaaggtatgtctaccatgcacatagctttcctggaatgtttggtttagttttgttttgttttgtcttttaattccggtctcatctcaaaactgagaatttcagaaatgtattgggttcagcaagcagcttctgatctgggataaggctgaaatagacttgagaaagcagagaggcaagattgtcctccccgggtgatgctctcaaatggagaagtgtgagctgatatgatttgatattagcaatctgataagttaatacatccaaaaggccacttgcctgtgttgcttcttctcaggtacacctcataatggtttttaggataacagaggataagaaaacagacctgagcttcatgtttgtgtttcctgtttctagcctagcttctccttgctgcttagctcacaaacaccagaaatatcatccttacctcctcctcactatgtctgccatgcaaaacaaaaactctcaactatctcataggccaggttcctccaggacagtagttatttcaatcttatttccccagtccttggacacacagcctcagtttccccttcgtcaatcagcagcaagcccccataattctcagcatgccaaaatgtcatttttttacctcagttgtgcacaaaacatttcatattcttaaatgtcaaaggatgacaacatctttttcaagccagaaggccttccagaagagaatggaaatttaaacctggaataccaagccttaacttagatatcagtgggagtagcaactcccaaaacaaccccagtaggcagttctttgccccagtgcatatctggcatctacttcaaaagtaatttggtaaatgccccaccccactccaagaaccccaccaatgctctcagtgacagaccatccacatatgcttccatacttagaagggtgtctacaccctgccaaaccagcagtagaaacttctctgtcatcctctaagctcaaaaatgttcttatctatgtcatagtctctacattaccttagagtgactgcctactgactttgaatatgggaagtgtgcccctaaccaagaaatcctttagaaagaagaaaagtccaatactaatggtgctgatggtgatgattctgataatgatgaaagatagaaacagtaaccaaatgaaaaggaaagccaaccaagcagaagccagaaatagatttaccactagacaatccaaggaatatgtagacaggtcaacaccttgaatattattagcatatagaggtccagttgaaacttcttaccttcagtagacagacaataaattttcacaagtctcacaagagacagctatatcagggtcctgccagcaaaatcttgctggcatatgcaatagtgtctaggtttggtggctgtttatgggatggatccccgggtggggcttgtgtctctagctgcatataaagcagaagttgacctagtcagccatcaatgggaggagaggcccttggtcttgtgaagatcatatgccccggtacaggggaatgccagggccaggaagcaagagtgggtgggttggggagcagggttgggggagggtatagggaattttcgggataacatttgaaatgtaaatgaagaaaaactatctaattaaaaaataaaatgtaaataaataaataaataaataaataaaatcaccatggaaactctctctctctctctctctctctctctctcacacacacacacacacacacacacaaaacacaaaatttttgacaagtcaccctgttccttccaatttgctgtagcagcaaataaaaacagtgagtataaccatcaaactgtggggctggttcctcttgcagttgaatgctgatttagtgctgtagagtaggaatcttccataggcagtgggttacctttagacacaagagaggtccttatatggcacacctgatctacacaagggaaaaatgactgaaatgactgtgctatattggaagtagaggccactaagacacccagtatagtgcactctgataaaggcttctagagtctagtgaagaaaatggctgcttggtaatggggtacctcaaagtcctcccacagagactaaaattctagctttgtgtctgatgagattatgggccattcattttgtctccagctcagcttccttatgtcccagttgggatggatttatcttggtcatctcaaagcctgctttcagcactgattcctagtgatgctatgacactaaaaagttcaatcaggaaagaaccacttgtcccaaggactccttccctttgatttccacaaggaggccacattagcatagcagaaaggatatttacattgcagttgacttttaaaattcaccaagagtggaagataaaaggaaaacacaccagatggagtgtgagcgccctactatttcaaaacacagccatttccactaaattagttggcacaaacttaaaattaaatatcatcctgattgctatttacagttgtcaacatgacaactatagtttgtttccaaaggagagaagatggtactaagacagatgagagtatttttggaattgtactttttttgatggaaacattaaaagaatagtcaattggatatgaaaatatcagggaaatcatgaaggcaactgagacataactcagcccctgaatttctagaaagactcccagcaaagacggttcgagcacatctgccaagcaaacttcagtgtctttgattttgactggtcctacatgctatgactcttgatgcgtttttagttacagactcctttggaaaccaaactagttgtatgttctttaaaacgtacttacaaatataggttaaatttcccactttctttcagtattgtttaagtcctacttgcggaagccccagcacagtagagagaagaatgagcttgaagttcagaagcttactgttgtagttttaatgggaaatatcctcatctcaagcatttggatgtttgctctccagttgttggtgctgtttggggaggtttaggaattgtacatggtcatattagagaaagtttgtcactggaggcaagcttaaagactcttgccatttctaggtcatgccctctgttcatgtttgccatacaagctgggagctctccactgctgctttaagtccatgccagctacctgcctccccaccatgctttctatcccaatggaaccataaatcctttcttctttaatgtgccttgatggtggagttttgtcaatagaaaagtaactaatacaactgttattaatactaagactggctttcttcacaattatacacattcatgcgcacctaaaatcaaggaataccatgcatggcctttgggttcagcatttccttctaagctccagctctctgaattaaaaaacattgtgctaatttattctcagagtaaatgtcacacatgtactgtcaggacatccagtgaggaaggggagacttctgcaaaggaaattcctcaaagactttggcactgttcttcagggatccagcaattaaacacagctgttgcccagatctcttaccttttaactaaaggtccactcctggagttacacagcagcttccagaaaactgaccactgggataaattattatttgtgcctttcaggtttgcatgtatgtgatggtgatgggaggggggtgctggcagagagacatataaagacaggcagaggagaaaaacaatgagttttatttctagtgtttgattattataaaatagccaagtatataaaataattgtctttgatcttacttatgaatttattgagttgctagataatcccttaagtggtggcaatttgtccttatagtatttctattagtaaagtaagttaacctattgcatttcctacccattaatgtactttccataataattaagtaaaaaaggactcaaactgtgcctttgtaatatctaccagataatttgaaatagagaaatttaaaaactcatagatatagctgaacctagaattactaaaataagtttttatagatttaagccttttgatattcatatttaattaaagttgaaactgcctagaacacacatataaaagatatgtcaggcattagttggtttaacccagtcatacaaattgtgtgatcaggtattcaaagttattgcttctgataatgcccctattctgaatgatacaaacttagaatttttgagttttatcactggctttcaaaattaccaagtgtcctagctttacttctgttactgtgataaaatgctctggcatttattccatcattttgagaaaatcaggacaggaactcaagcagctagtcctacccacagtcaagaacaaaaagagaataacacattgtggtttatctgcttgctctcagctagctctttcctctattatacagttcaggatcccccttaaaagggaatgatgatgcccacagtgggctggtccttgccttaccagttaataataaagataatgcctcatagacatatccacaggctgacctgatctagacaattccttaattttgattctctaccctggtaatcctaggttatgcaaagttgaaagttaaaagttaagtaacacaccagattgtattagcttttcttgccagactacatgtaattcatatttttagctggtcaaaaaatatctgggatagctctctgggatttttacaaggttccaaaatactgtcctcagtttgttcttcagttttgtttatttgatttttctttaagatttatttatttatttattatatgtaaatacactgtagctgttttcagacacaccagaagagggcatcagatttcattatgaatggttgtgaaccaccatgtagttgctgggatttgaattcaggacctttggaagagctgaacttctgacccatctcttcagcccattgtttatttgttttcttctttgtatttttgttgctgttttatattattttggttgttgtgttgggatttgtttgttttgtgtgtttgtgtatgtgtgtgtgtgtgtgtgtgtgtgtgtgtgtgtttgtttatctagccagtgtctctctgtgtagtcctggctatcctggaactcactctgcaaaacaggctggcctcaaagtcacagagatcctaccgcctctgcctctcaagtggtgggattagaggcatgtgccaccatgtcccacatcttctcttaattaaagagaaaattccatgattttatgaaattattgcttttacccaatctgtcccagaagtttgagatggacgattctgatgcagttctaaaatacaaccaaggaagtgttttcctgggacttcctttttcttccagcttttcttttttctttttttttcttcttaattttaaggcatggtaagtacttttcatgataagtactaattctccatctagaacatcataggaaatctaccccatttttgaccactattttatggtgttgattgttcatggggctgtacattcacatgggaagcaagaagaaaacaggcttcattgtccccatctccttgccatccttgtggttgtcactggccatcattaacacccagtcctgcattctgccttcagtcccctgaatttctaccacacactttatgtgttagtttccttaagtgcaaagtgctccactgcagagctaggaaagctccagcgtctggactgggcttccaggagtcttgtaaatgtcaccctgccctctcttgacttaagagtggcatttgggcgccatttgtttaatgaaagtgcccacctgaaaaccaactcattctgttttctcagattgatgtttatggtaattttgaaaatgctgccactgttcacccagtcctcactctgtccatatttctgaagaactccctgatggctccctgttctctagaccttcccacacattttaacattttgattctcagaacaagagagtagaaaggctcagtgcacctgagtaataaaagagtcacatttatttttgacctcagctgaactaaaaataagttttgtcattgtttttggctgaacctttgtcagccactaaattgaatcttccctttttgaatacaactttactgaaatatcattcaaatcctatgcagctcttttacttaaactctatagtttaatgatatgtgatccactgagattttagtaatctcaagtttcaaattttcatggatgaccatctttattatgtacaagtacttctgttccagttttgtcaggaatgattgtgtgtgtgtgtgtgtgtgtgtgtgtgtgtgtgtgcgctacgtacacagtatgatgacatgtgatgtatacattgtacacagtatgatgacatgtgatgtatacattgtaaagcaattagcataatcaagttaatatatctagcatatcaccacaggtgattactagttttcttgtaggaaaaagatataatcttttaagaaaattgaaatatacaataaattattgactgtggtcaccattaggggtaccagatggtcagaatttagtcaccctatatctgaaattttacaccttaccagcagatcttcacttctcagagctggggaactgctggtccactctttgtttctgtaagttgaacctttatagatcccacttatgtcttagttatggtttcctttgctatgaagagataccataacaaaggcaatgcttatataaagtacatttaaattagagctggcttacagtttagagatttattctattattagcattgcaggaagcatggccacaggccaacctggtgctagacattgaggtgaacattctacatcttgattcaaaggcagcaaggagaagactgtcttaaactgggtagatcttgagtataggagacctcagagcctacctatagagtgacacacttcctccaagaagtccatttccactccaacaaggccatacttcctaatagtgccactccctatgggccaagggttcaaacacattagtctatggaggccaaacctattcaaaccaccataacctatgagtgaagtggtacacattcgtcttccgtctttctatttttaatgtcctctaggttaatatatgttattatcagtatgaattttccttctattttaagaccaaattatgtttgtgtgtaccatgtatacacacacacacacatacatacatacatacatacatacatacatacatacatattttcttcatccatttgtctttaggtagacacttcccttctttatcttggaataatgctatagtaagcatggagatcttcatatctcttggaaataatcttatttttcttgtatacatacccagaattcagatcgctaagttgtataatggtcctcattttaaatgtctgaaaactcctactagtgctttttcatgatagtcacactaatttacatccccaccaacaatctacaagtgttcctcttgttctactgactgtcatacttggcctaacaagtatgaagtgatagcctgtggtttttattagcacttccctgatgattaatgacatttaacattttatcataaacctcttggctatttgtattccttctttggaaagaaagtctggggatgtacctcagtgatagaacataaacccagaatgcagaacaatttagtgtccagccttgatgctgcaaaaagcttttttgtataacacctttaccatctttgaaatttagacatattatttgctattcaattgtctaagcttcaagatattttaaatatgttatagacatattgcaagtatttcttccattcaggagttctgtgttttttaactttttttttcttcctgatgtgcagaaacctctccatttgttgtcaaagaatattctcccataggactgaatgtaggtctgtttcttgtcgaatggaaattcaggttgtttcaatattttacttcttaataataatccaagaatagctcttttcatttataattattttgtggacatatattttcattcttcttcaataagtaactaggaatgtagttactgtgtcatatgacaactccatgtttaattctggaagattgtgccaaggtcgtttctaacaccatcactccgatttacatttccaaccatcattcccatctccccgagtcgtcatgaagacagctgttctaatttctcaagattactcatcccaaggtctgtgaagtgtgagctccctgtggttttgattcgattttccatcctggtagctaatcatgttgggtatttgtccatggtttttgttcaattatattgggagaaatgtctattcatatcctgtgttcattgtttcagttagatttttgtgtctgctgtagaattggaagaggtcccttcagcatttatgttcttctacctgctcaacacccctctgggattatctagagaaatactcttcatgttttgccttctgtacagaactgcctggtagaagggctgcagtaccagaaatgtcttactttacaacttcttagttttttcttggtgaatcagacataagatgcttacacatctcacagagaggaagagcaactaagtttgaaagtcctaagaccaagtcctgttcagagactgtattttctatctacaaattttgtagaaaggccattctttgcctccatgatacccagcacaggaactgctgaacatgcttggaccttggtaaaattttgctgggaaataactgtgatgatttgttcatatatgggcctgaaatccccaaatacttactatttgtgtgtgtgtatctgtgtgtatgtgagggcacatacagttagaggccagaagtggattagaaatggattagcaggggaggctagctgaacagcaagctacagagttctgtctgtctgccactgcctgatgctaggattaaaacgcatacaatgcccagctttttgtttttactcatgctcttaggactaaatgcagttcttcgtgtttgcaaggcaagcactttactgggtaagccatttcttcagctccttctatgtggacctttatagaaagtgttttccaatccctggcctggtaggaaatatagtgtcaaaatgtctgattctttacctctccaatgacctgtatcttttccatcacatctatcataaagccatagcaactgcaaagatctattattatttatactgagatattctctcccaaaataaggctccttgatgtccaatgctgggggctaacagaagccaccagcccatcattttctttgaataattaaataaaagtttttcccgctgtactccaactattgtagtcttctcagacagctctgccttctcagaaaagatgcttttcctttgggaaactgtgtgaacaattcagtgtcccatgcacaccatttctctcgcgctcacatattctgctgtagatagctctgcttcttattcctaacgttcattgttagtagaggaacaaaatatgaatggattttatagttggctggggtcacactttagatgattcttggcatcaagatatagtccagcaagaacatagctgggtgaggagatgctcatggctttgtaatgaaggaatgagaataaaggctcagagatgcctctcaccatcttggtctcagtgttaattgaatgagcctaggatgtttttcatgttgtagaaaattccatctgacaatgtcttttaattgcctcgtgggacacctggaacaaaattctcattgtactgtagcagccattcttattgtcactgttgtggctttcatgttactgctctcattgtgctgtagtgaatgaggagtgatcagggtatgaacttgaacttcctggctcttctttctctgtgtgggttgtaaggtgaaatggctgcaaaagaaagacaaaggctgtcaataattgacaagagctgagaagagagacgagcacaagccaagtctgtggtatgtgctttttatctaacaaaggcaattgtattctcccttccggctaggacttaccagtccccgatatggaattctgatcaccagatctcatcaccatttctaggaaggctgaaagctgaattttgacactggaaaaaaattcaacttaggttattggaagcaaaatcaaatagaacatttatttccattaaaaaacaaaacaaaacaaaacaaaacaaaaaagaaatacccctccctattttattttattttattttattttattttattttattttgatgcagaatagcactggatctaaagtccagcgtgtcgagtttgcaacattttgtctcaaggctatgaactttccctggggaatcactttcctaggaatttggacttacctttgctctcaactaaagacagcttcactattcacttgaacagccatcaaatattttgtcaaacaagcctcatgtgtccagcgccgaacaaggattagagatatgtgataaagagccctgctttcaaggtcttgatcaagtaagatagaccaacgttccctaaaattatccatgatgaacagatgccagctgtgtctcttcatcctgccatggatgagcaggaatatgaaggggacttaccagataagaggaatttgggagtagagctactccatctgtaaggttaaagactgaacatgggtcctagtgcagaaaatagtgggttcagttcaggcaaccaggtagaccagccacaggcagtttgagtagtcctgtcaagcaataggtgacaaagttgcacttcagctccagggatagtcatggagtcctctacttatccacccatggtatgagcacagatatcacatgataagttcatgtaaggccatgttagggttcatcactctatgggacccagttggggaagctctacccttcccttgagtctggcatgtctgcttggttcatgggtctggtttccctgataagattttaatatgtccatgtatgcctatagtctcagttcaccctaattaacatatagaatggcttctgctccattcccaggaatgagtcacagatcagtctatgttggatctgacaaacagtacagtttctggcttatctagagtgatagtcattcctttccttcaaaatagagtcaaaagctacttagaagatgttgtctcccaaagctagcaacagcctaagcaaacattttagtacaacacagcaaaacttagagtagggaaaacctgatctattggttctaccttgttctgtgtgacaccatccaccaagttccctgtcatcctcaacttacctccacctttttctacatgcctgacttgcattcagaagcatgccatgatctccaaaaagtaacaatatactttgatatcatcttggtttccacaagctatgacatagtacactttcattatacactgctggacataagagagtcaagtaatttttaacagtaacgtaattatgaaagaaacagactaaaactaagtttcataccatgacagtctaaccataattggaaaaatacaaaattactcttttggttatatactgagcatcattgacatcattttattgttctttcattatttcactgtctcttatgtgagattttaaaaggcaggatgaactttaatacaagacttaagaagagagaaatttctcttgtgaattgagtttctgtgttacagctgctggttgaggaatgtcaacttcttctctattgtcccggtgctaagtctcctgttaaattgatgatgttttaaacaaagcatgtaatttgggaatgactttggaaattctaagaaactctttagcaagaggcaattcacatcactttcttttgagatgcttccccttaacagttcatttacaaaccagtcctttaatcctaggaatccagtagatacactttgacctctcttgggcccagcactatgtctggggagcagcagaaaattggctccctgcaatgacagagttgatgtcctggtgagaaggatgtacaatttactgacaatatgttctcagactatatcctaaagtccaaaggcagttaaaaagtgacatatctgtcacatatggctaggaaacttaatgatacttttctcttggacaagctcactttcaggtggtccctgtaaggttgtaaaggaccaggattcctaggctatggcaaagtttttagaatgagaaagaagcactgccatttttgttatgcagggagacagtgagtgtgctcaatgttgggtcattgccagtgccaagcattatggggcattttcaggcacactgaggactctggaagagattgaagatagacattgactgatctgcttcttacattttaaacagtgctaagtttattgtatagagaatgcagttagacattaagaacaaaggaagatgtgacctatcacagatgaggctggtagtttggatgtgcctgcctatagctttaagcatgagagaagccaatggattctaaatagagtggatatatttgttttgacacaggtttcacagcacatctcatgaagttcaggttgacctggtagtcactacataaccaaaggtcttcttgaactcctgatccttttgtctccatctcctgagttctgggattataagcatgtgctattttgtacagtttttgtggagctgaaaatcaaaaccagtcttgtgtattctaggtaaccactctgtgaagtaaactacatccctgtaccctagctgttttgctaagggaactaatactgcttaggcaacggcaataccagtcaccatgaaggagtgacaggccgggagaaggacagctttattagtggtatctaatgtgctggggaccaaacagtcaaagttacgttcaatgatctctaatctttttcttttcctttatgacttagacatcaaagatctgcttgcttttccatgtagagaaatgaaagcaatgctattgtttctgtggaagcctgattactcacaagcattcattacctaaggcccaatagagtgtggtgtgacatgtcagccactggggacacagcagtgcctaacttcaggacagtagggtaaaggatcagaatgaatgtgtactctgtgtaccacagggctttctaactttggtgctggtggtacttcataactgaaaattgtaaggagttttgagtgggagaggagaagctagaaaccatatgatgttcattaccatcccaggtatctattcactcgatggctgatgcaccttgatcccatttgtaacaacaaaaaggatctccctgtatcatctgatgattaagaactccaacctctgatgcctaaagacagtgactctcagaatctccaagcctgttctcttcatgtgcatggttctaaagtgtttgtttgcctgctactgaggtagtcaacttccacctttgccacaaaaacacctggtactgaagtagcctcctactgatcctccagtgtggctgaggacagcaaagtgtaagatgagatgttttaagcagtctgggaaacctagagaaggtagtttgattgtttgagttcaaaatgtatcaatttggattattttcagtgtcctaaaattctgaatcattaaaatatcatatgatcttccaaggtccaaatacattagatcactctagaagtgatctgcctaattcacaaaatcatgtattgcgtacacatgaactgcacagggtggtttgtgttgctctcgaccgccatctggacctcaaagtgtggtgcttatctgctctatgaatcaaatgaagattgaattctaaaacaggcagtcagatagtcaaagctccagccagcactccattttgtattaccaagaagcagtaatgactgaccataggtaataagactaaggttgatttgttatcatacaatattaattatataaaataatagactacattgtgatgttattatacaggcctatttgctgtgatcctattctttacatcttaccctctgttcctgatcctgctagtctatttcttcttacctagctcctacacctaccacaaattttaactctatggagaaaatatgtatttgtctttttgagtctggttgatttttcttaacacagtgaactccagtttcatttattatttagcattaagatgaatattactgagttaaaaaccacatgctggatattgtcaaagtttttctgtatttttatgtaattcttatgataaaaatatgacaacattttgatttttttaacatttcatattcagagagttgaacctaaatatctcaccaggctgataagaagcatggtcaggattcatattacactgtgccttcagaagccactctcttggtcctctgggcagctccctctccaactgctgacaactggccatttcactcttttacctttaagtctgctgcttgatactacttgtggtcagggatggtattttagctggaaactattttctcatcaagacccagttcttcatcctgaaatattaagctgtgaggttttctgaggccaaacatggggctgctgtcgacacctgagttaatatccagtgagcctctagggaagaaggaaaacacttgaaatatggctcctcaggaatttttcaggttccttttaacttcaatcaatagcactagcactggtctgctcagttgtcttttagtcacacagacagagcacccttattttaatagaagtcagcaaacctgtgatgttgccacattgctgaaggaaatcctagcccttcaccagggggtttcctctaggtctctatctgggaaaatacctttgtacagataatttacaggactgtttgttacaaattaaaacatataaaatgtaacttatttccctctgtgtcttgtgtgtgtgtgtgtgtgtgtgatatgtgtgtctgtgtatgtctgtgtatatatgtgtgtgtgtgcttagtatgggaaaggacatgtgtgtgctttgtgtatgtgtgtgtgctttgtgtatgtatagcctttatgtgtttgggtgtattttataatgtgtgtgtgtgtggggggggggaaacagatgagcttatgggcagaggccataagaggaacttgtgtgtcatgctctatcattctctgctttagtgccttgagactggatctctcgcttaatatggtgctagactggcagccagcaaactccagtgatcttcttgtctccaccccacttcccaacagtcttgggcttaccagcatgtatgtgactatatctagatttttacattgattctgggcatagattgaaactcgggaatttaagtttgcacagcaattactcttacccagctgagttacatctctagcccttctctgtgtttgtgcaagtgtgtgtgtgtgtgtgtgtgtgtgtgttattaaacgcgttctcacgcccggccaggaagaacaccacagaccagaatcttctgcggcaaaactttattgcttacatcttcaggagcaagagtgtaagaagcaagagcgagagaaaacgaaaccccgtcccttttttaggagagttatatttcgcctaggacgtgtcactccctgattggctgcagcccatcggccgagttgacgtcacggggaaggcagagcacatggagtggagaaccaccctcggcatatgcgcagattatttgtttaccacttagaacacagctgtcagcgccatcttgtaacggcgaatgtgggcgcggctcccaacatctccccctttccttttaataagagcaaataggccacccatattaatgagagtggagatagaggtcaaatccccagtgtgtaggtaaaggagccatgtacaggattagctcttaggctcacaggcttttacccagagcaaccctgacctgctcccgtgtcgttttgcctgggggaagggaactaggacactgaaccttcatgaaagatgacatgtctcccnnnnnnnnnnnnnnnnnnnnaacctttattaccgcgacccgcagttctggttctggaatgagggatcttccttgcgccagtcccgagttttttctcgtcccggaattcggcaccaattgttattaaacgcgttctcacgcccggccaggaagaacaccacagaccagaatcttctgcggcaaaactttattgcttacatcttcaggagcaagagtgtaagaagcaagagcgagagaaaacgaaaccccgtcccttttttaggagagttatatttcgcctaggacgtgtcactccctgattggctgcagcccatcggccgagttgacgtcacggggaaggcagagcacatggagtggagaaccaccctcggcatatgcgcagattatttgtttaccacttagaacacagctgtcagcgccatcttgtaacggcgaatgtgggcgcggctcccaacatgtgtgtgtgtgtgtgtgtgtgtgtgtgtttataagagtatgtgtgtatttttcttgctttggaatagtttcctgaaacaatccaaagcccaaaagtagtgagagatatgtctcctttttcttctggccactggttctttcctggaatgttcagtcttgtcagtgagattattagaaaataatccagtggaagatttagctgtctgatcccttgcctggctcacaagaatggacaagtggacccgcataagcttcacgcaaagcaaaacagaacaaaacaaacaaaacaaaccactgccacaaataacaaaacctaaaaacccttaggtcagaatatggtgtgataatgacaatggtatcactcactaataacacaaccagctaagcacaaccttaagttcacagacatacatgaaatttctttcagtcaaggaagcttctcagatatgatattaaaggtagtctaacacttgcatgtgttttatatagcatttgaaaattccatcaacagctggtgatttcaaaatgcactactttaattgttatattggtaggtggttcattttgaatactctttatttttgtctggattcaatctttagcaatgcccgacttccacctaagttacatttctgtgacatgggcatcaattaagttttttttcctcttaaaaaagcaattaaatacatcctgtagcattaataacacccattttcacttaggtccacagcactcttaggggaatacttctttgtaaatcttgcttttcacattctggcttaatatccagctcttaactctgtctgccccctaacctccttaacattggggctcaggaaagtgatgactttaaatttatggttgttaaatagattgttaatgaccagaagagcccatcaatcttgctgaccacaattatactttaaaaagaagatggttaattaccggaccattttgttgatggttattttaatcatactgactgcacttcttggcatggagagccattaggctggagaggcaggaggcaggccattgtggcaaagtggtgctgatgctggaaattggactccagaggacaatttgtcagtttgcttaggaggcacgaagctcactttgttttactcacatccaactgcttgtttgaccatctaaattcttgtagtttttctctctcattctacttcagtttgcccgtcatgggttcattatttaagatgaattggtctgtgtaacttgaagatcccagaaggaatgtggctaaatcaacttgggactacagattattgtcatgtattctttgtagccttttagctttctttcatctttatcccaatagctttttagtgcaagtatttgtatagtgtgtttgtgtgtgtgcatattagtatgtagatggatcacatatgtgaatgtatgtgaaagctagagaaaacttctgatatcctcctcaggaatgccatcagcgtgctttgtctctctttcgcctggaactcattaacttgtctagaatggctgcccagacatacagagggatctgcctgtttgtatctgtcacagagtcacaagcacataccaccaaatctaaggacttttaaatagtgtcttggaatcaagcaaaggttcttatgcttgcaaagggagccctttgtcaactgagatagctctctttggatcccctacacacacttttaaaaatattaaagtctgcattccagcatttgcctctatctctgtcccttcaaagctgttttactatgaggtttctttttcaaatgaaattcctcaaagtcatgcatgcaatgtgagttatgtacaaaatacctgtaaatatacagcatttaaaaagatgttagcttcataaggtgggggtacaaatgtatcctgacactgatgcccaacaaatagttgtctgagaaagcccaagaggccaagttgcccaagtgagggaagccaagagacctgaatatgtctctgacatgcagcaggatatgaaattatatatggtggattctttatctgaaggaattagttgaaatttcgtggcaattcatgggattctcagcttttttttttttatttctttgtggtattaggaaatgaataacccagaatagctattccccttatattgtcctgtattcttttgactaacaacaaacacccttctatttggaacctactcaacaactactgcctttaccaactttggtcttcataaagaacaccaaccccctcccatatcacatatcttttagctttggttaattgtccatacccttgccttggtatccttgagagtgtcacaatttcggattgagattatctctaactggggccaacagttaacctgccattaagggccctttaccttggaaaactggaggaatcatcagttaattatttgcctatagattatcaagcactgggaatgtatataagtccttggtgtaggttagtccatgccctactcatttggatactgtcttagacactattgctttgaaaagacactatgaacatcacaacttttacaaatgaaagcatttaattgagggcttgcttacagattcaaagggtcagttcattatcatcatgggggtgggacatggtggcaagcataatgctgaacagaagctgattgctacatcctaatctataaagagagaagcagagacattgggcttgtgtgggcttctgaaacctcaaagctaatccccagtggcatacatccaccaccaaggccatacctattccaatgaggccataccttctaatccttctaatcctttcaaatagtaccactacttggtgactaagcactcaaatatatgagcctataaggtcaattcttattcaacccaccacatgtacatactggtgacttcatactggataaatgctgagtttatactatgtgattatattgaactggatgagagccgtgcaaaacaaggaagcttctaaacatatacacatccaattctctggaataatgaaagactagggccaaggagatagattaagaaaactctataggtaagtaatactgaaaaaaaatctcaaacacagttaaaagcagggcttatttggagaaattctgagaccttaggattcttcatgaggttttcaggaggaatatattgataagcatttctaaaagtagcctaaactatgtaaatattctcttccctttcattcatttgctctcttacacagagcccttgaggcaatagtatttaggagaccatacctacaaattctgatttagactcttaagatgcataaacatgtttgattaatttcaaagtagtaatagactgatcaaatttgttcccacttgacatgggaattaacataaacattttctcacagaaacaaaaaggtgaacttcagatcttcataggaaatgggtagatgtagcactgggtattcaggaagccaagtccaatctctctttaaccctgtcctataggttagaaaacagaagaattcaggacaccagtttctgttccaatgattggattataagaaggacttctagagtgaggatccgaattatctttagaattatcctactgcagcatgtgtagagaataaattataaaaactcattagaaaaaaagaaagagagagggagagacagagaaggagacagagacagagagagacagagacagagacagagagagagacagagacagagaaggagacagacagacagaagaaagagagagagagagagagagagagagagagagagagagagagagagagagagaaaaccaatgacagaatcccatgtgattccttccaaggaattcttggtcaccctcttcaagaaaatcacatgttctgaccagggagcacttccaggagtttcactgtctctaccatctccaagaagttaactctctacttggaaatcataaagtaactgacagatcagaccttgttttctgacatttaatatcactgtgtctcagtgccctgtaactgtgctgccaattaaccataatgtggtattttgagagccatttagatatgttattttttaatgatctcctcattgaaagtataaagctttgcctgggattctaatcaaggctttcaatgaaaaagagggatgatattaagaaagaaataataagcactatgaaaaaaaatgtaacatgttgtctttgccaggagaagggaaaagaacaacacatatctctgccagtgtgtgtcctctcattagaattgtacatggactactgcatgatggctgctggctcttctcagtgaacgtagtacttatcaacccctaaagaatccatgtctccttagtgagcaccaagaatggtgtgcagtaaaagtcctctaagcctgtgtacaagagaaagcttccattagcactcagttcagacttgagtttatttagaaatcatgtttcttttgaaatatgcaaggcacattcatgctttcttctcttagtaaacctttcagctccactctgagggaagtcagaggatggatgaagactgtagtttcatgtataaggagtgtaggttcttctgaagaacagaaatggctaggccatgattctctaatgagccaaacacaattcttggggccttatccatatagttcaattggaggtatgaaaaggttttatttaatgtaacattagttttcctaaatagtctgtggttactatgctagatttattacctttagactctcatggattaacttcttaagaatcaattaagcaagcaaattcttgggaagtgccctatattatcatcagaaaccttaagaacagttgcggatgagcagcgtctggtggtatgtgccaggaagccaaggctgattgttgagatcttctatctagttgactttgcactagctaaagtccaagcatttggacaatcttggtatattatctcaggtagcgtactgaggtcaaaaataagagtagaatgaagaacacatagaccaagtaaatctttaaaaaggttatattgggtaagccatatcaccattggagagtagagcacaactcagtcctgatggtatttgcccactccccccaagaaagttaaaaagaggatcagatatctttttttctattttgaaattcatgttcaagcaaaggaagggcttggggattgggaaggtggataagcaggtggaagcaattgttgaacaaacttgaggacctgaattcaaatacccaggacacaatgccgggtatgccatgagtgtctataaccctggtgcagtggagtagagacaagtgataacaagggcttgctggctaccagtctaactgaaaaattataaattccagccttgtcaaaaagccctgtttcaagataatgcagagagtaatagggcttaatcttcaatgccctctatcccttacacgtgcatgtgtgttcatatgctacacatgtacgtgcatatatgtgtgtgcatacacacacatgatacatatctttataaagtcttatgcactttgaataaatcatttaaccagtaagcatgaggtcctaggtggaatccttgatagctgcaaacacacaaacacacacaccttgacatttttacttcagatactttatactacacattgtttaccattaagtgatacacagagatcattatgaaattaggaataaaataagataatagtgattgtgctataattttttctaatatttctgtgctttcatgcagacttttgatggctataccaattcacatgtaatatggacacacttttctccttactgaacaacaacaaaacttaagtttttgtttttgtttttgtttttgatttttgtgaaagggacctcttggtatgcaccatgtatagcttttaaacataatagattagtaacttccagataccacatagatagataggtagaattttcaagtctgaatttctgggtgtaaatttatcaacagccaacttttgaatgaaataacactcctctctttcttctcagagatttccctcatggcaatagaatccttgaaatcctcagggaacaaattggggataaaagttagaaagcacacccggcttattttccacactctgagcagacccaagaagaaagactgaatttaatcaaaaaagattttattgatgaaggtatgtctcctccaggctaaactttggcccctgaatgctaataaaccgtctcatttctcagaagtagccttctgcataaaatcctagaagagaccacaggcagaatacatcttgggcaaagggactctcagatgatcaaccagatgtctgtaaggtcttcactgtccctaacagagttgggaggcacctgattagctttaggctgcctgtagtttaattcttgggcagtcatctgaatgcctttggatgcttaggagaatgagatttgtactgcaaaacccagcccccagcctggctcctgccagctgagccctccatgggtgggcatctgccccctggtgttttatgcctatcttatctgcacatgtggaagttttactgcccagatatgaagatgaacagtctgcagcctccaggttttatgaccactaattagtaacctgtttgttctcttttaatctgttattataatagggcaccatgacatacagtttttctttggccgttctgcctgtggcagccagagggagccttactttgtaccttcagattaccaacaggcttggaaaacagtaataagggggtatttaaaggggcagactgcatcctgaagtgctcagtcttgtctcacatctggaattgggttcctattcgcattgtagctgcaaatggaagttcctccctaaagatgatttttagagtctggggaacaaagtgtgaaactagagagtgtctggagctggtggtccttctctgctctcttagctttcccagagatcagcagtgaggggtcatgcacaggactatggtatttggtgagggtggcaagtaatgggggatgggttggggttcagggtttatgttcataccatctttgatcagtactttccttaatttcattttctctcttgtcttttatttcctgcctccctttcccttttactcagccttggcttctttcctcacatgccggactttatttccgtacttgccattcatatctgcctcccattctggaaaacctgtaccatattttctgacaagttagtgagtgtttggtactacatattttctttccagatatctaatgctgtctcccagcctgtcagaagagttgcttaatgctcccagctaatgagagtggtggcatcctctactgagagtgggcactgcgttttttcccattttttttccctaattggtcaccattaggggagtttgtatttttcatgccacacatatggtaggatatggaacgctttgctccagtgcactcttccttttttctttctttctttttttttcaatctttctttggttagtaatatgacatgcaactatagaagcaagggaagctctggggtgctggaatatttagaaatagaaaatgtagccagagtttgcctgatagacttgctgcacccacataggtttttgcccttgatcccataactttcttatccttacaagcaaatgccagcattggcttcttttattggatgagttctaaaagtcacaaatgttctctggaccaaggtctacctccctgctgatactcatcctgaatggatgcaaacttttagaaaccctacagggaaactgaacatagtactacgggaagacccagcaatgcctctcctgggcatatacccagaagatgttccaacgggtaataaggacacatgctccactatgttcatagcagccctatttataatagccagatctggaaagaacccagatgtccctcaacagaggaatggatacagaaaatgtggtacatttacacaatggagtactactcagctattaaaaacaatgaatttatgaaattcttggcaaatgaatatatctagaggatatcatcctgagtgaggtaacccaatcacagaagaagtcacttgatatgcactcactgataagtggatattagcccagaaacctagaatacccaagatacaatttttacaacacaagaaaatcaagaagaaggaagagcagcgtgtggatactttattcctccctagaatagggaataaaatacccatggaaggagttgcagagacaaagtttggagctaagacgaaaggatggaccatccagagactgccccacccgggggtccatcctataataagccaccaaacccagacactattgcatatgccagcaaatttttgctgaaaggaccctgatatagctatctcttgtgagactatgccagtgcctggcaaatacagaagtggaagctcacagtcatctataggatgtaacacagggcccccaatggaggagctagagaaagtacccaaggagctaaagggatctgcaaccctataggtagaacaacaatatgaactaactagtaccccccagagcttgtgtatctagctgcatatgtagcagaagatggcctagtcggccatcattgggaagagaggccccttggtcttgcaaactttatatgccccagtagaggggaactccagggccaagaagtgggagtgagtgggtaggggagcagggaggagggagaatataggggacttttgggatagcatttgaaatgtaaatgaaaaaaatatctaataaaaaaaagaaagaaatcctacagggaacatggcaggtgccagcaattcccagtagaaaactgatttttttttttttaatgaaagcaatgctcattcccttcatgtatatctccaggctcagagagagagagagagagagagagagagagagagagagagagagaagtcaaagaaaaacatacctgttggtaagactctaggcatatgtatttcagagacaaagaaaggaaaacataaatcagggttcaaagtaacaaaagatttgctaggaagatgcaggacaagaggctagatcttgaaatacagtgatcaaatgtcacaatcgccacaaaacccaaacccaatccagatgagctcctggctcatctataggtgctcagaataccctgatgcaaaccctaccagagatgccaacactggggcgagttcagagaatatttttcttcctgggattattctattctatactctctcaagcagagaaggcacagcacttctctctacttctagaatctctcagtgataagtatgtacattaacagtattagaggttaaattgaggcatatggaagctgagaggtgagtggctgagcccactgtgcaccttctgtcttcttgtgagtgcctttactaaatatacctggggaacctccaactaatcctaatggccaattggggagctttctcaaggtacataagagtagggaaagaaaaacagagaggggcatgcctgacattgtcttttcttaggaacatcaaaaaacagttatcaagtctatattagaatgctaattctgtttggctgtaattccagttagccaaaatatgttacattttctgaaaaataaaacttcaggaatattttgctcttttattttattctaaaaattgattgagctctatgtctgaactctcttggatataatattaaatattaagcagaaacttttaatatcactatgaaccagatctaatgtagagctttctcaagactttatcttgttgttttctgtttagcattttccattgcttcctgtaatgtccatggcagcccactggcagtctataaggtactgacgttcctatcctcttattgaagtggggatttacttactgccccacagcacaattccactaccctccttcaatacaagaggaaaagaatgtaaatttaacactttttcagtagattgtggtagcttagtattaaaaattaaattatagacatgcatagccaagcagtggatggagcatggtaattcttatggaagaataagaggaaggattgtgggttctgaagagtataggaactccacaagaaaaccaacagagtcacctaacctggacccttaggacttgcagagactgaaccaccaaccaaagaacatacacgtgctcaacctagacctctccgttcatatgtagcagctgtgcagctagaacttcatgtgggtcctgaacaaccggagcaggggctatctcaaaatctgttgcctatagctatcagaataccaacaatagcttcagaattaaagcatgaacaaaggaaagtggggaatgaagaggtcagctcagagctgttagaaaattccaccaggtattcctcccatcttggaagagacaggtcagagcacatgtaggccagaaagaataggctaattaagcccctgctatttcattccctaaagaccaatcagtttaaaggatgcactatttctccaatcatattgtgcctacttactgatgctctattctgcccctggaaactgtataaaaactcaccaaacaggctgaccagggtccccacctctccttcgggtgcaggatgatgaccccagcatgctggaacaataaattactcttgctttgcattgatcactggctccaccttgtttatttgggtgggcaggggagggtctgggtcagtccctgataagctaaggcttgtcagagtcttacactgccagctaggctgccttgtctgcccacagtgagagatgaaatgcttagcatcacagacttgaagtgtggggtagggttgggggatgccacacctgcccagaggagaagcagaggagggagggaggatgactgtgggatagggtgactggtgactggaggcagggggcagtgagcaggatgtaaagtgaagtaaattaaattaaattaaattaaattaaattaaattaaaacaaaaactaaattcaagcaatgtaaaatgactttgttgaactttaatgatcattcatcaacacctctctcccaatttcaatcaaaataaagtttcctttaggaaagttgtgtgaccatgttttctgtgagggttttgttgtcgttgttgttgttgttgctgtcgttgttgttatatgtatagttagaggtgtgcaggtaatgttgccaaactttgtttatatatgcatgtgtgtaggtacacataaaccaacatgcacatacaactttatcttaaattttgttggtgcaaaactatgtgtatcacataatttatatatagtcataaagtagatattcaccttttcagtgagtttcataaagccaatttgattgtcactcaatgctttgttgatgttgaatttctctatctatgatcaatctggttataatgtaaccatgatctggaaaattcagcttgaattaaaagcttagtgtctatccaattagctcctcttcctcatcactgacaaacaagtgtgcacgagatatgaatgtttactgatagctttgttgatgtacgtgcaaggcaaaagtgaaatggcaaaaattcattgccaaaccaaactcatttgtcagtgcatgagtgactcttctggcaagtatttagtttagaatactaaagggtattttctcagtttctatgtaactattcaattatgccttccataactcaattaactatgattttaaacagcttatagatttttctgaaattatactaacaactttgtgagctagtacaagatagttccaacacatcctatcctacttatgtagatcctgaaatcagaaagaagccctcgaaatagaatagaatagaatagaatagaatagaatagaatagaatagaatagaagttaaatagaatagaacagagtagagtagagtggaatggaatggaatggaatggaatagaatagnnnnnnnnnnnnnnnnnnnngtgtctatccaattagctcctcttcctcatcactgacaaacaagtgtgcacgagatatgaatgtttactgatagctttgttgatgtacgtgcaaggcaaaagtgaaatggcaaaaattcattgccaaaccaaactcatttgtcagtgcatgagtgactcttctggcaagtatttagtttagaatactaaagggtattttctcagtttctatgtaactattcaattatgccttccataactcaattaactatgattttaaacagcttatagatttttctgaaattatactaacaactttgtgagctagtacaagatagttccaacacatcctatcctacttatgtagatcctgaaatcagaaagaagccctcgaaatagaatagaatagaatagaatagaatagaatagaatagaatagaatagaagttaaatccaagagactcatttatattttgctttgcttccatcttgtcccctacaaagcagtcacaacccaagtccatttcttatttttaacctccttttatttttctattttgttgatttgaacaactacacatcagttttaggcttgtgtatctgaagctaagaactgtgccttgttcgttcagtgataacagggacaacctgggctaattcatgacaccttggtctgtgaactggggagttggatatcatacatttggaggaagaggcctcttaccagacagagcacctgtctgtctcctcccagtggggtttgtgtttctgcacattcctcaggataatctgaagttcttggaaggtcccacccgctctgcccatctacccactctgcttgtaagccttttcataatcagtttgtattgtgagggtatgagtcatcttgtgactgagacaaattaatggtaggaaaactagattctattgccaaggctgcatttctctgataggtaccatctcagagatttctgaaaactcaatctcttgctgctcagttgatggtgaaaactgtatggcaatgatctttttttccctattaacgtgtttttgaacttaaacagtagtattattccctccttgtatccacctagttgaatacttatatgtcaacatttcaataaccagtttcaatgatttcatgaagtatgctagcttcattgtttcagaacactgatgtataaactgcttactgtattttgccttctataactccaacacatcaatgttcatatcctacttgtatggatccccaaatcaccaatcagctccccccaaattttaagactttaagatttaccagcaatgattctatattggatgctggcctttaaaaagaaggcaattgtgagcatgcctgcacttgggagtcagactgtttaactcaagcagtgcacggggatcaactcacatctaacactgtttgaaactggggaaaagtacagtggccatgaaaaagaaggtagccacacaggacttcttcccgggcggagttttgaaagtacgtgatgctgagtgctcgtctttccatcctgtgatatgatattatttagtaacagaaagactgcccccatcttactggttgtcagcaagaaccagctccaatattaccaattcagaagttataggaggacatggcttctttatcttactattctgacttcaattcattatgcattatatatttgtggaatatccttagtatagtaatagcaaagcactgatctggcaaactctaatatctttttaacctgctttttaacctttcctttctgactctattttacttttcttcatgtatttatcctggaaaaaatagttaatcatagaaaaagtaaggataattcagttttatcctgaacaatatggaatcagcatttatccctatctggattcctttaggagcctcagtttacattagtttacagacaaggtacatgtgatgccctaaagttaagctccacctcctgatagggatagtaggacccactctctatgccagtagaaaaggactttcactgataaactattatccatttttccttacttaatgtctcttttaaaatcaacttttattgaattacttatctttaaagttgacttttattgaattagttatttttaaaattgacttttattggattagttcttttacaatttaaagtctcttaaagaatatttttatttcaaagttatagctaatggatggataagtactaaaaatatgtgagaagtgtgtgtgtctgtatgtgtgtacccttgtgtatatgtggtacatgagcatgtgtgcaatgtgtatgtatgtgtggagtatgtacatgtattatatggcatatgtgtgatgtctgaggtatgtctgtgtggtacatgtgtatatgtatatgtgtatggagtatatatgtcctgtgtatgtggagtatgagtgtgtgtgtatgtgtgtgtatatgtgtgtacatgtgtgtaatatatatgtatgtgaaatgtgtatgtgtatgtggtatgtgagtaagtgtataggatatttgggggcattcatgtgcatatggagtatgtgtatggttgtaaagtatatgtagaggatgagtgtatgtatatgtgtggaatatttgcatgtgtatggtatatatgtgcatgtatatatgtgtgtattgtttatatagtatatgtacatatgtggtgtatatgtagcatgtggtatatttgcattgtgtgtaatatatgtggtattggtgtgaggtatatgtatgagcatgtgtgtgtattatgtgtgtggtatatatgtatgggtagaaggtatatatggtacatgcatgtgctatatatgtgctagtgtctgcctcccactctgtattattccctaaagacagggtctctcactgtcttagttagggtttcattgcttttaagagacacaataatgatggtaaatcgtataaaggaaaacatttaattgtggctggcttacactttcaggaatttagttcattatcatgttgaggagcatggtggcatacaaggagatgctggagaaggagtcaagagttctacatctttatttgccagcagcaaggaggggactatgtttgacactgagcatagtttgagcataggagacatcaaaatctgcccccacagtgacatatttcctctaacaaggccacacctcttaatagtgcctctccctatggaccaagcattcatacatatgtgtctatggggccattcctagtcataatatcatactcactaagcctggatataagctggcagacaacaagacccaaatatcctcctctctccaacccccatgtctaccatggacattacaggcatgtatgtgcccatgccccacttttttatctatgtgattggaactcagattctcatgcttgtgcaacaaacccctttattcactgagtcatcactgtagccctacaaaaatttagaaacaataaaaaacttatctgatctaattgatcatatgcatagtcaacaacttgtagtaagttgcaaccagcctctatagaagcaagtccctgtgttctttccatcatttatccctgccttgtgtcacctggccacttattcacataattatagagcagataaagaggtatgtttttataaactggccatcaaatgtgtattaacatcactaccaatgacaaatatttgtgcatcacaaacccctgttgtgtgtagggactagatccatgaatccatgcctttctttcacttgaagtactgtgaagtgcctaacagtaccaatgatacccttccgatagtctacagtgttagtgcacaatggactgtcactttttatatactgtacctaccctttccatcttagtgtaaatctctagaactagctagagcatcctgtcattgtctctaatgttgaaataatgacgaagcctgaagaagatgcccattgacctaccattcacataaatatgccataactgcttctccttttgccattggaccagcaacagctaatggattttgatgattccctgttgcttcatctctcccaaatctcttagctgtggtaagctcatttagtcttcccaatactgtcattcataaccattactgttctcccaatctgatagatgagcaacctgagggacatagaaattctgtacttactcaggattaaaatagctagtaagtcctaccactgtgagcaagatagcttctgagaacctgggatcagaactgcatgggattataactgctgctctctaacaggggctgtgcatgaagtgtagaagcgagattgatctggacaggcatgtttcttgtgccctgagagaaacctgtgatagaaatcaaaaggccaggatggctgtgtgaaacaaacggatggtaaagaatcttccagattgatttaagatggaagaatggaacatggagagaaaagcaacttcaaggccctggggatggaaaggacttgtaatatcctggtaataatgcaaaaaagactactgaccaaaaaccagccagcaaggggagagaggctagagactaaggtggctccagtgcctcttgatcttagaggccatgtgaacacgtgcacagagaggccacatgcccctgcccaggtgatctcatagaagtttcttttcttttgtttgatgtatatttttcttttatttctacaacaatgtctccttttctcattgttcccttgggtgaatactttgctaccttgctgtgagaaaaaaaatatttcattaattataccattgaatttttcattagtcaagccattgaattaaagacttagtataatacagcccacatgtccttttaaaagcatgcaaaaaacaataaacaagtaaataacaacaattaagaacaacaacaaaacaaacaaacaaacaaacaaacagaaaatcctggagagaatccattaaactaggtgttaagacaagctttcctccttcatgatgtgtcatgaacaacctgcttcctatttatgagcctagcagttgatgtgatgtgactgtcattatcaatgttagtgtaaatattggacctgggccatgatattaactgtattttccatctattttattagaatattaagctctttgtggtctgcttcatactgtggatttttggggagtggtttaattttatcatagtgtaagtcacactgttaaggtttccagtccttgcttcatctcccccattatggcaaatggcagttgattagggctttctttagatcattatcaatggttttctaccttgcagatagtgcggttaagacaaatctatcatatcccaaagatcctacacagcttgttatttctgggtgatttattaccctcaccatggaaatgttgttagtgaacgttggggaagcagaggctgtattgagaaatatcaatgtatcctcatgttctggcttgcagtgacagtcagagatccatctccttgacagttaccttgttaacatttcgatcacatggcaaatttgccatttttcatggtaacaagtataagtttgcacaagaaccacagatagacgggaaagataaaacagctctctcttagtttctctgtgtgatgtaatcagtaatatttggggggagtgcaataattactccatggaaagctcagctactagaaaatacatatgttgtagaaagctgaaatttttcttcattaggatgtgtcctttttaatttttttttcatttgctgatgttttgatgaacagactatgcctatgtaaattagtgagacataacaaaggggtttatcatcagcaggttaggtttaaacacagcatgaggcatgcagaaggtgaatgaaagtaacagcatgcagaaatctggggactagagaattagtggtgagtctgattgtttctccctgggtcttctaaattccctgtgaaaccctctgttgttagtatcaatgttgagtaatggacattcatcaacaaatgcctaccaatgcctcagtgctgtgctcctcatgggagacgatattgtcttctcttgttgttctcatctgtgttgttgttctcagtgctgtgctcctcatgggagacgatattgtcttctcgttgttgttcttctcctgcactgggctcctttgctgcgaaacctttagttgaagaacttttaaaaagtccaatttctgggtgttgccaaagggaacaatgtgtttgagaaagcatcccactttggaatcagtattttgtcatgttgactgattgtcagaaatgggctctgatcaacccacagtaaagatgagctctattggtgcaaaggacagctgccagctggagcacatttgaacatctgacaagctggtagcttgaaaccagcacaagtccactggggcagtcgcctgaggtaggaagatggggctctgggtggtacatcagtttcttctcttatgttatgtacttcactgctacttgtgcctagagcatccaataacatttttattgtttctatatgtttctttcacataaaatatatatatatcaaatgttatatatatatatatataccaaatatatatatgctatgtacttatatataccatatatgccacctggtatataatgttttcataattatataagtaaataactgataagagacaaattatgctaaatgtagttaattatatcttttgttataatatatataaaaatatgtgtttgtttgatcttattaaagactgtgtctcaggtagcccaagtgggccttatatttattatgtagctgaagcttatttgcaactcctgatcctcctgactcagcatcccaaagaatcaattgtcatgaggagctcatttaattttaaaggcagaaaaatttcgaaggctgtatcttttccaatgataaggtaattttgacctaaaatacaacttatttgtttattcatgtatgtttatatgtttgtttgttgagacattgacttgctatgtagctcaggctaaccttgaatctatgattctccaaccttagcctcccaggggccaacctatactcactaaatatcctttgtatttcttcttaatattaactgtacacagactctgtttaagaaatttaagctaaaaatgatgtttctgttcacttgactttagcttcttttaccttttcaatgtgtgaagactttgctttttcatctgactcacagtgcaagtggcatagctcattttggaaaagagggaatatttttcttctattttacttggaagttaccactctggtgactagtgttcaaaagcgaatacggactgaggcctgagaactccaggaggaatctcattgctgtgacgggagatctgatttcccgaggttggaggtccttgactgtccccactccgttcctctctcattgctggcttttgtttccccttccctgcctgtctgtgctgctcacccttatgttgcatgtctgaacaaggtcaatgtctccgtatgaattcctctgagggcttgtcctatgtcctacaagccggctctgctgtccttgtcactgggtcactgctcagggcttccttgcttatcgtatcttgctgttggtaaccacaccttcctgtccctcaggctcttctcaaagctcttcttccctctggtgtctttagcctgcctaaatctcatagataacattaaattatcattagtttttaaaaaaatgttgttttgtagggggaacttggggtaattacagttttctgaatcacttaagaggatgcttttttttttggtaggccattaaaaaatctttaattaaagagctcatctactcaagaggaccatgtcttcatggttggttacctcattttcacatataagcataatcattaagaatataatttatcaagtaggaggtcagcaggagtaggaaggggctaaaagagggaattggggagaatatgattgccttacattgtgtgtgtgtgtgtgtgtgtgtgtgtgtgtgtgtgtgtgtgtgcgtgtgcgtgtgtgtgtgtatgtgtgtgtgtgtgtgtgtgtgtgtgtgtgtgcgtgcgcgtaaaattgccaaaacttcaataaaatcagtaattttatttataaaagatatttttccctgtcctagcctgcatttttcctttctgaacttcttgttcaaggctagcccgtttcatggtcacaaatatctatagtgatgcaaactcctgtctcaattcccaaatggaaaaaaatgatttccatgtttttccaagggtttgtcctgatggacagaaactctttcgtatatgcctccttgccagctgagcaggtcagtgaccagaagtttgttatctgactattcttcctagtggcttagatcagtctggtccaaatgggaacagctttgaggaaaagcaggtacacagccaacaggggggctgggaggtgtttgcacagctctgtgtacttgatgaggagtcccctgcttctcacacagtcttctactttctctaggatcagcagcctatttaccctacaggtaagtgctaagagcgccttccctcctgaaacctgttgttgtgcttcagatttagtgacagtggagcctcaggggttacattggtttgctttggagggaaacacctccaccccaccccaactcatctgcagtttcccagctctcactctgcctccttgctgggaccttcaggcagatgcctctcttctattccaagatatttggctttaaataatatggcatacggcttaccaaaaatccatactaggtgatttcaagcctcatgcagttcacagtgctattttggaataaacagtctgtgcaagatcacggttctgtttaggaatgtaatcaatatatttttaaatttcaaagcacgttgtggtaaaaatatatttaacataaaattgctagacccttgaaggtacgtgatttagtgccatggcacaaacccagattatatggtgaaaaggtaggagtgtgtgattcttgctataccaaccttcagaattcctctcatcttggaaacctgaaactccaaatccattatatatggacccctttctcctctagcctctggtaactgctgctctgttctctctgtgagtttgactgctctgggggtgagagtgtgaagtaacacacaaacaccttctccttagtgctttgttttacttgagctgttgtctcccaggctcacctatgtgccatgtatcaggttctccttcccattcagtgtgtgatgatgttctacttgcagaccatgctttggtcatctaagaatccgttggtgacattggtttgcttctgtaccttggtaatcattcttatagcagtgatgaaatgggtatataaatatctgatcaagtccttgatttcagttattttaggcttatgcccagggtgaattagctgaatcatatggtaattctatttttacattttgaagaatcatcatgcttttcactgtggctctaccactttactatcctactaataatgcacaagtggccagatttcttctcttctttgcacaattgctttaaaaatacttttaataatttgctttgtatttttctatcagacattctaaggaatatgagttctgatttgaattttctcaaagattagtgatgtgtggaacagccttgtgctctaactctctaaacaaggtctttatcatctgaatcctccttactaggtaagaacttgttggcttttagtgtgaaaaccactatattctcctatctctatgactgctcttccagaggacctgagttcaattcctagcaaccacatggtagctaaaaaccatcagtattccaatgccctcctctggtatgtctgaagacagtaacagtgtactcacatacattaagtaaataaataaatattttttaaaaagaccctcatcctagctaccaggaaatcagtcttccactagcagccttcagatgaagatgtagaactctcagctctgcctgcatggtgagtgcctagatactgtcatgctctcaccttgatgataatggactaaacctgtgaacatgtaagacagcccaattaaatgctgccctttataagacttaccttggtcatggtggcttttcacagacataaaaccctaactaagacatggaacaaaagtaaacaatgccaaggtccagattaagaattcttataagccctgcccaacgccaaattaaaatggtcacatttttgtttcctgcaatttcagtcttctgatactgacctcacctctaaaagggaactcctagaataattttaaaatagcaacctgttctcacagttccatggctacagttccctgtagctcagaccttgtgtaggttaaatggagagctggcagaggacaatacataatgtacacgtgatctcagagttcttcattgtgacagcaatgaagcaagttatacatttttctcccattgaggaagttcctcctctgactgtacctaaggtctttccttctccaagaatgaggttcctgggtgtgtttcaatgtctcagggcctgttattcagtagttttacagggatccaaatagctttctttagaatatctccatccttgctaggcaggtcaacatatgacaatgttatagaaaacaaagacacactactcactagtgcctagacaaagtaaggactaccatgtgagctgattttctgctgggagccacacctgaaaagttgtgtgtttgaatggccagcctctgttttgttttcgcaacacaggatggaagaaactgtaatttagaatctacacaattcttgtcctaaaaattctcaccaaacaagagagctgtttggcatcctaagggtatatgtgcttaagagaaactctgatgtttaagataatgatgtgactttatgaagccgtgtcataaaccatatttccacacttgtctattccaaaactgctccccatctcccattaaaccaataagtttcctggtaattgtaagttaaaccacacatagctgtctctaaaaaaccatttttttctcatgaaaaaaagttgaatcatccttctttgacaattgaaagtaagaaaataggaatatagttattcgaaaggcttcccccttcactggaaaggatagattataaatcacaggccttttcccctattcactgaacaaagataatagacccaaaaagcatcctggcaccagacaagtgttgtgatggccccagcaagaatggctgtagcccacgttgcccctcacactgcagagtgaagatgaaaaggtgatccaaccactgcttccctgggagacagaggcctggaaagcaaacagtaagtagttaaaggaagcaactgccacctccagcaggcacctcagaggtcaatgagaacatagattgctttccctcaggccttggtgacagtgacagagggaaggaagcatcctaaatcatagtctgaattattgttccctggaagcaattctgaggccacttcagatgtggttatcaacatcaaacaaagcattcttttctcctcaggacctgaaacaaatgaggggaatctgttgcggcagtccccttacatacatacacacacacacacacacacacacacacacacacacacacacacacacacacatacacacacacacacacacacacacacatacagacacatacacacacacacacacacatacacatacctgtttccagagtaaacaaaaagatactccaaggatgggactagttaataaggatgtctaaggaaatcattgtagacactgtaaacatgtgtgtaacatgtaaactgtgtgtgtgggtgtatgtttgggggtgcttttagaactcccaggttttcttgggtttggttatccaggcttcttcagttttgctcttgcagaatgggcactgtcttccaggctttggggagtgaagattgaaggtgctgattagcaggtgatgaagaaatcagggtgttagaaataaggagaactcaaaaggagcttccacccctgcgaagggaaacagcaagtactggagatctatcttgttctgacagcagcacccctagagtctcatgtggtgccacacagaggctgtcagggggtattttattctggttaactgaataaaactttatgaagcaaaccaaccagtggctaacaaagcttttgataccttgtagtgctgcatatattgaaagaggaggttctgttctttaaagaggaaatctgctcacctaacttccccctctctggaatctgcctaagaacaaagcaaggttgctgacttctgagaattaagttagaaaacaaaactttgttttccaaactcgggtctatttgacagtgaaaggaggtatcattcaaagtttcccatgacatgagttgagcctcactcttgaccagtggttctcatctgggccacactgtacctctctccttaggaacagggacatagcccaattgggagaatgtttgcaaagcacacataagaccctgggttcaattcccagcactatgtaaagcaggaatggtgctacatgctatacttttagcattcacaaggtagaggcaggaggatcagatgttcaaggatattatctcttaggaagttaagctatgttttaagttcaaggccatcctggggaacaagtccaatctagttttaagtggactttgactcagttcaagatatgctggagatggaagtaacctaggttgcttcagggttgtccagatgcctgaagatagctggtcctaaatggtctccactgggaggaaaaaggcaatgttcacatgtgatcctgctcagtttgatgtgttgttagttcaaattggagtttcccccaagaagctggtaaaatggcttcagaacttggaaagacagtccagtgggagtcttctgtacaattgcataatcttcaggttagaatgtcatgatcccatctgctgcagagtctaaaatcctcagctgagcctaaaatcagctgtcttcatgaaaagtatagtggaaatgtctagaagcctaaaagatttttctattttctttcctaagtgtgaatttacattatgaaatctggtagaaaactgcccattcagccccgattctacagttcttaataggcattgctcgtctcagaaagggccatttcttctctgagacctttttaggcagtgagttttctcccttcctggagtcccaaccctccctgaacatggacacaaaaccttttaagtcatgcaggttttgactttgaatcaccatgcacaagagccagccacatagctagcctcacacaatcttccactcacattatgcaatttgacattccagggcatggtcagtagacttgtcctactgaacaataatatagttggcatgtgctgaaatttctgctgtaagtcacctgcgagatatgaggtttgatattatcatcatcaatcaaatcgtgactcagacagcgacaaaacccacacatacacacatacatgcatacacatgcagaagcacacatgtacacatgtgcctggggacacatacatgtcctttattacaggtaatctgagaaacattgatagaaaagatgaatgcataagtgtgtctgtttcttctaaaagcagggaaagtacatggtctcttcatccttcaaattttatgatatgggatttttgaatcacaccttactggggacttcttccctattttgacttttaacacattcagtactaagagcagaggcaataggacgttagtcatttgcacccagcagggtcctccttccttgtttatcatgcctctctctacttcacagattcactcctgagagagcaaggcaggcttccttgagtgtgaggaacatagcagttgtcattgcctaagagagtcagctgcagtataaacagaagagttttatcctcgaaagatggctttgttactgttgtgcttctcctgctgtctgtggtcatgttgttcatttcatcactatgagttgtctgatggccagagtactcattaagacagcacaaaaggaagggcagggcgggcaaggtggagagggaagggaaaagaagggagagagaaaagaggaggatggacagagattatagtataaaaattgtctagatttgtgacaggctaaccaaaataaaaaggaaaatgtttctaaagcaactttttgtgtctgtcagactacaaggctattgaaacaattccaaaagaaattggaattttccttgaaatctcattctgggaaaaggaaaaggcaccactcagaaagaaagaaattttacatatatctaataatttatttatcagacttacaggtgagactgagcccaggcaaggatggagctatgcaaagcagcccacagctttatggggactgcttagatgtacaaatccttggcattctgggttttgtttgtttgtttgtttgtttgtttgtttgtttgttttgagacagggtttctctgcatagccttggctgtcctggaactcactctgtagacgaggctgacctcgaactcagaaatccacctgcctctgcctcccaagtgctgggattaaaggcatgcaccaccacgcctggcgggcattctgcttaaactttaatctcattcataacttgggggttatttggatccctttactcctttttccagtgtggccatattaactaaatctctcttctcaaaaaaaaaaataataataataagaatctgtcttctctgctttctactttatatttgcctcttaattggcttactgaaggtgagtgactggacctgactcagagcacaggttgtgatccccaagttttattacagcttctgtagtcattgagctaaccggctctggtgactggtctccttaaacctcagtttccttacctccgacatatgaatgagaattatcttctagatgagacttgagtataaccaagttcttggagggctagttgtgattccatgctcagtgctcggtgtccagaagcagttagtgtgagtaagtaagagaagtggcctggtggcctggtcctcttgccttgacctcccaagtccttcacttacaggagcacaaagctacatcagcttcaactagtaactctgaaaaacaaacgcattaaggatgactggatggttattagttcatgcaaaggagcaattgatgggactaggcagtgggtcctgacaaaaatcacaccatgtgaccagtctcgggtaggagggttttttgttaaagaaggggcatgaagatgctctctgggataagagaggaaagaaggagtgggagaagggagaccatgacttttattggggccatggcacatgtgcaagacgacatgccacaggagagacaatgagttctgtcttgggcacctagaaattacctgtcttgtcccagggtctctcaaaaactgactataaagatgccttattgccaaggagtcactttcagctattcatggctggacctgattgcttacagcaatcgtatcaagcacagctctgaaaagagtttttatttctttggtgtgatgcctgcaccagtacattcactgctagtgagtatattaaggttgtgcttatgaaatttaggcagaatgagtgatacagaggaacagtatgcattcttcttcactaatctgatagaaagaggacactcgtggtctacattggttggagaataacagctatttttactccctgaaaaggagtccactagaaaattaactcatatttctcatttcataatgaattgctatggaatggcactgatctctggcattcctgtatgccaggctgaacttaaattctttgtagtaagaatggccatttttatgggataaccatttcttctacattcctatggtttagggtgatgtactatgatattagccctaagtcatagaccagcctatctgtgaacatatgatcccttgtccaaatggacatatgatccaaaaggagccaactagaatctccagtggcctgttacatatgaatggaaagaacaaattttccctccttctttctccttttctcctttgaaatctgctcacagagctagaataagttggtcaagatgtggcttggaccttctacttcctcatctatgcttgccaatgctaaggtgagcagaaaaacaagccggcatccataagagagcagataggagaggtgggaagaccacacaagggcctacatcctgacattctgaatactgctgagttgaacaacctagcttccattccctatggattagcactgggagtaagggtaatatctgtttgaagttctatgtcgtatgaaatgcatggtaaaccatgtagtacttgagggcagaagctgactttcaataaagttttattaaggacagggagacttatttaggatctcatatctgttttctatagtaaggggcacttgataccattttcttttctcagtcctttgacaaggagcagtggtatgtatcctgcattcctccttaccattctgaaacacacacattgctggttgcatagaggaagcaatagttttctgcatgggaaggacctcctttctttataacaaatatcctgtgaatagaaaacagaagacaactaactgctctgctctgaaatgcagagacaaagtttgtagaagctataaatgggcattttgttgctctgcaatgcagaaagagaagaggacacttcaggagggtatggatcctttgagagaatgtcactttttaaaatattgaaattcactcatgtggttgggtcatgttcagttttaataggaaaaaaaaacacacacatgaaaaagaggttttaaatgctttccccaagagttgaccatctatacctaaaaaaatgttaaattgagatttagcgtcgagattttgtaaccagctctgtgcataatcttcatccttacctctttgcttcatgccatttatttaagaatctactgtattaaatgctgcccatccaccctgcagtctgaccacagggttactttatgagtccacagagcagggtaaaaagcagtggatttctgtctatattatatatttagagtctaatgagtgtgtaatatatctcagatcatgagttgtgagcccgttttgaactacatgtggttttcttttacctaatacctaccaaaaagcagaggatgcaagagacaaacaggagagactggaacaagatgacaacaaaacacaacaaatacttgagagcaagtgaagtcaccatctcagtgatggattcagggtcaggaccaaaattcctcttgtggtatctgggtgtgcatgcaaaaaaagggaggcaacctctgtcttcagaatgaagttataacttgattatctgttctgctacatttctttgacgattgtgtcaattgaaaattaatgtagtcactataacttataagctgcttcagtagcttcttaaccattccctgtgctaggttcaggtagcaaatgtcttaattttagttcagaaaggaccaattgtataaaagcagggaggttgggtaatctttatagccaccactggtgatatattcttttattagggtcaagagtggatcttctgaatattgagagaattgaaaccctcaaattctgccataagtttctctgatggtatagtttgtagtcttaactaattataagctgaaaagaaaaacaccacctctgcattaatgaagtttacatactcttatcctaagattagagttggctctgtttctacctgtaagcaaaagaagataatgagatattatatacaacagatgcccaacggggataacagaaacccttacatttttagccagttcttgaagcaagattgcagtggctgtcagggcagtaaaaggtcactctggttcagcctgatgataattggttggtcctggtcagtcacctggacaggggtaacctttgccatggtcagtggctttcttactttcaagcatttctttcatttcctcagagacccttgtcttttttaagtctgttctgcccactagtcagtgattcacactgttattggccatgtgagatttaccttcggaacacataccagaaccaaacctttccattgtgctcaatgttccatccctcttcataatcttataggttaatctgggaaatagcagttgccttactgacttcttcacttctcttcttgcccataagagtctcttctccatgtggcggaactcatcaaagcttagatgcatggttgggttgatgatacttaattgctaaagtacttgctttgcaagcacgaaggcctacatttgattccccctgaacctccattgaaaaaccaagaccaaatgtagccaggcagtgcccatctgtagctccaggctagtaaggcagagaagctggatgtcttagtcactgttgcactgggatgaagagacaacatggccaaggtaagtcttagaaaaagagcgtttacttgagagcttgtttacattttcattatggcagcatacattggtcctgggacagaaacagaactttacaccctgatccacagtcaggaagatacagagtcagggagagccactgggcccgggcatgtgcttctgaaaccctcaagtgcactcccagtaacacacctcatccaacaatgccatgcctcctaatccttccaacagttatctggtgactaaagtacaaatacatgaggcattgaaagccattctcattcaaaccaccacccctgacccctgaggctattctgtagtccagtgagagatagtgcctcaaaaacaaggacagggcacagactcacttcaaagagagaggctctgattaaggaccaactctgtttctggagatgcctgtctgctttccattatttctaaaacacctccattaattcctagctaaaattttggtgctaaagcacaggagcactttgtaggttgtatactcctctcgctggctaaactttcctctctccccttatacatatttgtctttttttttttcttttctgagactcatatcaccaagaactcagcagatctgtagacttaatggtttcctgattcaacttgaaacctagagatttttggtgtgtcatgtgaactcactttgggtcttatccctgatttgtcctcttctcctcccctttttatctgtttctgctttctcttattctcaccacaaaccagctatcctgcaatattcggatcagaggcctttccttattggtccataccacattcaatattctcacaccaagattaggtccaagatcaatctaagggtgtcctaaactggcaccctcatccagacccaagggttctggtcacttatttctggccactttcagattataggtgataatttattaccagaaacatgcctcaccattatattgcctaaaacaggtctaagatctttattcctatacacttttggcttatcttaaaacaaaccttttggtattattatgtctgtcgaatgatgtctagacccattacaaactggataatactttggacattcagagtctcactgagtcagaaagcttcataacacagaatgggcaaaagggctgacatattccctgcatccaagtttcttttacatcttcactcctgtcttctgcccaagtcctcacttttacacctaaggttttatgagctcaaactctaatgtggttgataaggccctccttattagaaactgaacaaattaagttatattaatttttctgtgctgtttaaggcagtgtgctggctctgaatgagatttggccttccctcttcagactcatgcatgtttatcctccaaacttctgtcctggatcaggctggctccctgactgtgtgactaggaacaggagggcaaaccagcccaactcttgcccaatcctggaactgggctggtagcaacacttaggacgttatttttctaaactgaaacattatactgtgattctagctactctatcagctacttatggactcagcttccttgagctgagaccatgcaattccttaccgtttccttagtttgctacttttggcctctgtctgggccataggtatcatctggtcctactgacacactaacctatctaactagtgtttcttaagaaaaacagtgtcacaatcgacattttatctgagaaacaatggactccacagggacttgaaatgcccaggtgggtgacaggctcactttaccatgaggctgagttcaccttgagcagaagacaaccttgtgctttgctgtctcagctgaggaccctcgtcaagatggaggcaagcatgtaacttcatcatcatttttgctaaaattataccataaagaggaaaatgtcacatgatttcacaactgtcttggttaatgtgaccacatggtataatgcaaactggcagctgccataaccttcaggctcagagttttctggggccactgtactcttttacatcagacgaaggagaaaaaaagcagactttcatattgttttggttttgggtttggatggcttcatacacacacccttatttcactcctgttagggggctcctccatctctaagttctcactaattttccttttcataagtcacagccccttccttttgccctatattcccatgccctgttaccatctttctatatgctctactcttaccattcaccttaatcactccacaagagagctgggtatccctcttagatagaatttgtaatctcttaaaggtagataatgccaattactcacccaaatcctgggtctgtccactaaggtccagcacttctgggctgtcccttcccctcatcactatggattcagactcctgtcttgctatgtctttacgtaatgactgaccccttcccaggaagggaatacattgcccctttcttttactctgtccttggggtctagaatggagagaaaagtacctaaaagcctcaggtggattgagagactctgggatggaaatttgatatgattgataacactatatgttgggtacatatgccaacatctctcacttcaagacttcagagaagtgacctgcaggtggactgttccatctcagagtttcccttttttcatcctataaaacaccaagactctccagaccatgtgtgtacagtctcacttctatagagaaactgaggcccttcggtttttattaaagaacaattctacttcttagagaaaaacaatcaaggtgggtgggcctctggctttcacgaacaagggcaagcacacacacacacttctcgattcagtttatctcaccatgacaaccaagcctcttgtttgcattttgcattacagtggctgacatgatctgacccctcatgcttttatactttgctcactcgctaaactatacccacactgacttttcctatttttggaaataccaaacttgtccccagccttaggaccaacagtagtgtcctctgcctagacttgctccctctctcttgtgattggaggattctagtttctgtcccagctcagactttaacccttggccaggccttccctgactttcttgtatgaaaccagttcttattctatatgctttccatcccacaatcgtttcttgtttaattctgtaccaaatgccactatctcagattttctcattgatgtaagggtttgttatctgtgcctagtaaagagttgtagaatggatgagctattctacagtggtatatgtatatgatatgatgccttacacagagcactggagtgtaaaacatgcaagaagagccactgaaagccgcaagagcagagaacagggcactgagccttcttggctggcttctttctagccctaagctacatagcctcgggctcacacagctagatcagagtccagagagaacagcattgaggaagggcttgatacattgttaactattgtctaccactgcctgtgtgctcggctggcaagttagcctgtgaatggagacacttcttactgaaggagccttaagtggatggccaggggcaaaagcatcctgttagtgagtgaatgaatcttaacaaaagagctggcttcctttaagtcctgtggaggagctgacccagaatctcatttgatacttcattgtatcccaggcctggttccaggaggaggtcattacttcagccaataatccaacataaaggcttcctattcttcagttacataaagtaatacaaggcacatcccagcatcagacattaggattaacactgacaaggcttagttaaaacgctctaccagacagcggctctaaagtgactaacccagctaatgtggcgcacaatgattcttacttcacagggagaaggaccttatgcttaaatactattaacacgtttactgtgatggccttgctgtaacaatcatagtatctaagtatgaatatgatttcttaataatatgaattctttaccattaatttttatgcttttaattttgataatgtgactcactactatggagagtcatctctttccttgacttaagttatttttttccttcctgtttttaaagtaaaattgaaattgtgctattaagatgagggcacaacgtgcaaatggggaactagctatgggagttagagtggacaagtcagaagtagatggttttcaatttaagctgaatgttgaccattaattaacagtgataggctcagtagtaacactaattaccagcctgcagctcttgcccctggggaatggcaggcagccttgatgttgtagaaattgcactggagattacaggagggcagggcccttgggcctcccttccaaaggattagcatgtgtactgtggatttcaggattcctttcctgctttatacaatttcctgtgggcaggagcattctctcaggccccttccctactcagaagtagtgctttcaaaggatcatggttggaggagtatgtgctaagttcatagcacaaactttttccagaagtcacaggatacagtaggctaggtacattgtagaacagttagtctgtttgtctcggccttcaaacagtaaaagcatatgcctaccttatgctgtaggttttgtatttgtgtatatgttagaaaagtcttctgcagtaggtagacttcatctgttatttaagatgactcatgctctaacctctcacattttcctggttaacatgacagagagaaaagagtatgctgtataatatcaattcttaaatgcttccctcaagaagtagttcacgtcttatatcatttatttgataacggcagccaagcaacatggtcccatctcattttaggaaagccgtccttccttttaacaggggtgagataaactagaaatatcagcgtacagtgaagactacaggagctacctcgctggtcagtaataggctcagttccagctgcaatcacatagtaagcactgcagcctggctcaaggatggatctatatagcaaaagaaaaacactcgcctcaattacaggaagttacctcacagataaccgcccaggccctcagccatgtaatccattttgcctgatgaatgatagtaataatttctattcgttcaattattattttttgcattcaaaagtattgatgtaatccctggaatgcgctagaaatggaaagtatgtatgtctatgaatcatctcacatggtctctggcctcctgagatttgggtctctcaggggagacaaatactttaaaagaaaagaattaacaaatgtgaatgctactggttggatgtgtgcaagcaggccacaggtgttcatggttctccctcctttcacagaaccctgacaaccccatgaagggacctcccacagttctgagtcctttagtcagatcactagagcaaggtacatggctttcaggtgacttgttctttgagatgtacagaacagtggagcagcctaagaactactgtgccaactcacccatttactgctcattacagttgtttcctgggtcacatgagaatgggtcggggtggcgtcaaaggtcaacctggctcaggacatctatctcttgaaagagccctgtaacagatgatatcagtgggctaccacaatccctagatggtcactttacacactgctccttgctgtccttcataaaccccaaaacattctggaacattctaaccattgatgtctactctgcctaagggaagctagtgaatgtgtctaaatacccttacttctttggtctaaagaaaaccattgtagcgtgtatctgtttcttcccagagggagagtcttttactcttatgaactgtctcatagcacacattctgaagacttctccttgccctctgttactgctttattgctttactagagattgctggaatcacctaatgctgttttgtttaagctggttgaggtatcaaatacctgtaatgccagcatcaagaagccgatgcaagagagtcttcaatctgaggtcagaatgggatttataagaagacctggtttacaggggacaaaaggtgggagggttacttgcatacctacccagaataccaacagtctctgtttctctacaatgggcaagctaagacaaaacagtgagatctgacagcagcaactccggacagtccagggtgttactgcatggcctccaggctttagcaagctgattgctgctctgctcatgtttctgaaaatgtcactgttagtgtatttagtcacagcatccgcagctgtcagcatagactacagcctcaattgcagtgctttttcaaaaagcatcttgtgataatttggtatttttgtgtttcttattcatcatgactaggaccaattacattgcatggtctttgtggggggcactttaaaacaggaggaagactgtaggaaatatattggactatttcatttcctttctgactgcagtgattcatggccgagttaaaattcctttcccaggtgcagagtttactagttaactttttgtcctaaaatatattgattaaagaaataaattaaggtccaatttatgataatagacttcttgtccttaaaaaaacacacaaggtgctctttgagaaaagatgatgaatataggtttttagcataaattatgatggatttgcaattcatcaccttcctttccttgttcttccttagcaaaaagacttcatttgtgcgttatcaaggaagggatattattagggatgtgattattcggcagaagtgctaatgatgatgggaaaactttgaagagaatgtaaccaaactggaagtttctgcagtctgaaaaatagcagtttgaaagtttgccttgagcattttagtctttcagacattatcttccttaatgaggcatgaaaataagtcttttcctgtgagagatataaataaaacatacacatatgtatgtgtgtgtatatatatataatataattgtatataatatatcatgtaacataatataaaataatatataattattgcatgtaatatatgattatatattatatagagagaaacacatatattgacattatatattatatgtaatatattcataatatataaaatatatatgtctcatgtcaagtgtgcacacatacacacacatatatatatgtatatatatgtatatatatatatatatatatatatatatatatatatatatatatatatacccttaggccttcaacttgagagcagggaagtaggacataggagcgtttctagtgttgtcagtactcagttcccaggaagcattataatggacaattcttcttcacccttctcaccttataaatttgtcccaaggtctccatagtgacccgtccagcaggtccagttattcgagggtatcgaggggaccgtctcctaagaaccaaatgggggggagagacggacagacactaagtgcgatgaactatgcataaccagtctgattagcatcaaagtgtcactgtattcagcaatgctcaaggcttagatgcacaagcaaaagaggaaatacttctcagcaggagggatggggcagcagaaatttttcttttggcgactacaaggggaagcaggaacttggtggtaccagggtacatctgtggtcaggacatccggcgctgacttagtgctggaacattctgtggttgttctcggaatggtgcttcggtggcctgcttttgacccccttttcttctggtggggggggcaattcagagatcgagacaatagagttgtcttaatagctcccaacaccatagaatcttccaagatagcagaacccatagacacttaagtctcttgcataaaaatatgattgcattcactatnnnnnnnnnnnnnnnnnnnnnnnnnnnnnnnnnnnnnnnnnnnnnnnnnnnnnnnnnnnnnnnnnnnnnnnnnnnnnnnnnnnnnnnnnnnnnnnnnnnnnnnnnnnnnnnnnnnnnnnnnnnnnnnnnnnnnnnnnnnnnnnnnnnnnnnnnnnnnnnnnnnnnnnnnaagaacagtcagtgctcttaaccgctgagccatctccccagccctgtaatgggatctgacgccctcttctggtgtgtctgaagagagcaatggtgagtacattaaattttaaaaaaagcaaaaaaaaatatgattgcaaataacacatgacacatgcatatcctctagtaacttgttacctctaggtaacttacaataccaaggtcatgtagattccaggcaaataattattatcctattcaaggaattttaaaagagagaggctcttcagtccatgtgctccctgactccagtaatttttttatgtgttcttgactgaatctgaggatgctcagtctgtagattcaaaggcattctcaggaagcattctcactctgcagtggcccctgacagcaacgcttcttctggtccagttcacaggatcacaggatcttgcaattgtttctttttttcttttcttttctttgttctttttttctttttttttctttcttcctttcttttttttttttttttttttttttttgagataagatctcacataaccagctgggcagtggtaatcccagcacttgggaggcagaggcaggcggatttctgagttggaggccagcctggtcttcagagtgatttccaggacagccaggactacacagagaaaccctgtcttgaaaaaacaaaacaaacaaacaaaaaagccaaaccaaaacaaacaaacaaacaaaaagatcaaagatctccagatctcatgtagccaaggctgacttcgaactcatgatgtaagtgagaacagccttgagcagctgatgcccctgactcagcctcagtttctttagatctagatagattatctcaggtttcctctatgtcaacctgacataaagccacaaaagggtgtggccttttcctgaaggttggtccttatctggatcttagaatgcttgcttctccatgggcagattctctttccagagaaattgtcagattgttgttcgccaagtttccctaccataagcatttagctcttaacaataagatgtccaggggcatcttacatgaatattcctcatgtatccctggaattgtctatttcaccaaggacacaactctaattccttaccatggtgcatgttttagacattaaatacctgagtacttggtgtatttagagcccctgtgatgtgattgtttctagaacaggccaacactagaaaatatgcatacgtggtcacataaaaacacacacatttgttgtttctctacctttatgttttatgtagatgtttacgcacattgccctatgaattcctctaaatatttgaaattcagatccaagtctttccattgttacacatttacaaatacccactgaagccaataagaaattagcttcattatcttctccttctctcttgttctccctccctcgagttctctctctctgtctctctgtctctctctctgagtgtatatatgtatgtatgtatgtatgtatgtatgtatgcatgcatgtatgtataaactcatttgctcaatattagcattccttgcttgccactactacttctcaagcattatgcagacattagatgcacctccattcccacttctgtacggtttctcttctgccatgctgtcctgtacattcagcaatgtgcctgttaaatcactacccacttcctcagaatgccttacttccaccgttggcttccatggatagatactgtcacttgtcctgaggaatatacaaacaaggatggagggggaaggagaagtataggtatgtgtctgtgccatagactaaagttggggaattgctgacctcccaccacactggtccctgtgttaaatgagtagatgcttctttgccttccattcatttttctctattctcttgaattttctacctcagttcaaggctctttttaagcattgcagcacacagaaatctttcatagcatttagctgagtcagttggacacaaagcctaaagaaaaggacaggagctagcagttagaggctgtagtatcaggggaccagtaagtggagctcagagattcagatcaacatatatttattctagatcatcccccttttttatgtctacttctaccatctgttttttttcttttcaagctcttaaaaaagaatctgttgacattcacagtttccagtattactgttgacacaaatggtgagaaacacattcttcatgcattccttcccagggttccatgcaaatgatgccaccgtataacctagcaggggagttgtgtgctttcccacactcagaaggcacactggcttggaaccttcttagatccccatgtcttaaatctcctggcattcacctcttcctcaagcagaaatccttcttccttcatttgatttttcccaggtcacttgcttatgtcagtatgcgatcctatggagatatgattgcgttattggcaacattcttggcagcctgattgaaataaaaaccagatgaatgcctaagatgactataaatcttctaccttgggagcctgggacaccatccccagaggcagggaagtgaccggaatggaagaacagcctcctatgactgagtctatagcaaagtaaaggcaagtgctctggcatcggtgcttccattaatgtccaaagccctcgagcaagagcaaagaaatgactaggcctgctctgcccttggaaaccatcccaccacagaggctgcaatttaattccacttgtggcaaatgagacctaaactcaaattacatctcatctgacaaagagaatacatcccatgccttatagaagcaactccagtgtcttccagagaaagtgcttggtctctacagtaggtattagaattattttgggttttaaacttggctaccatatcccaaaatgatgcatgattcaggcatttgctcagttttgagagtctgtgagttgggtaagtgttgggtaagtgttgggtgtgtcctattgactctgtatcctttaactgaagatcatggacactttctctccaggtgcatcattttcattctgaaattgaaagagggcaatttttttcttaaatgatactcagtcaaggaactaagtacttgataaacagaaagtttacctcactatttcttggtgttaccctagacacccaaggcagtgttttcttttatttacttgtttagttctaggagaattagatttttcagtagaggacagtaactgctaaaaatgttaggttaacactccagtggcacagtacacaccaatctactttgacggcggctacttgtccattgggataacttctcacagtttactgtgaagtgctgttctaaggactgtgcccacacatattcctgagtgagctggagtgtgactcccctcttgtatagagcttctgtctgccattgttaaaagggtaatgtgaattatagaattcacagggaacaaatgtataagactgtaacaatggtttcttccttgagattttggaaatcttacctgcaaaatcatctggcatggcattttctttaatatatatataatttttattattatattatatatatcatgtattgtcatattttagttctattcataccatcattttaattcaaaatattgtttctcttcttattttctatttagtagtttgcaaaaggtttatctgattgttaaatttgattaggaagtttacttctgaggcaggcaggtccctttgtcagcactctggagtttaaatttgagctagtctgggctggtgtacatattaggccagcctccattacagaagaagaccctttctcaaaaacacaaaatgaaatcctactttcagctttttcatcttccttagaatgctttgatttctctctcattaattcttggttttgttttcactgtaatttttttttcctaaatataggctttctttttaatgtttttcctgtttaaatttggcagtttactaattttgaggctatcttctcttctaatataagcatatattttaatattaatttttattgttattcagtttaagtaactttatttctttgtaataaaatactaaacagataagtaagcttgtggagatatggatatagtgtttaagaatagcttaggttacagaacattttaatgacacttctatgcacagtaagcccacataggaggagaagcctgggatatagatggttgtactagtggatggatagggcaggagacaaaacaagagagggttaatgaaaagttagcatagctttcttttatatgtggtatttataagcatttagcatacgttaatgaataaggaattaaataaaataaggaattttttcctaataccaagtactcaccacatgctattcaccagctaaacattcattagcttctgtcgcagcacgtcataggcaagactagtgtttactgagattttagtgcagaacaagtgcctcgctcagtgagtaataaccaagctgccgcaggattcatgggttggattactagaaatgcaaggtgaagcctactgatgatgaggccttcagttgtgagtgtggtgtcaatttggcaccaagtgtaatcatctgagaagagggaccatcaagtgattagtgattggtgggtgaggcctcagtccattgtcagtagggatactcctgggttctatatgacagcaggctgagcaaggagagcaagtcaataagcagtaccattttatatcctctgcctgagctcctgcctctaggttcctaccctggtgtgcgttcctgtccacccttagatgatgaacagtgatatcgaagtgtaaaccaaataagtctttccctccccagcttgcttctggccagtgtcccttcacagcactcataacttgactacgacagtgaggtaggaagctccctgtgttggggatgtttcagaggactgctcaccccttacagagaagtgcttctggaaagacacatgagcctctttcctgctattactgaagatctccagatagctagtctcttcctcatttctcattgggaaaattattactattactgattcctagacctgggttcaaatactaactctatatacaaccccataacctgggaaactaccctcttccacacccaatgcagaagaaatctagaaccgctcttggggttctcagtctcactaataaaataatttaagaatggatttaactggaggttcaaggacaatttgattttatttactaaaagaaaacctctacgggtcaggcaagctgtgactctcagcagctacctgaatgaggacaataggggaaaaagaaatgactcatagtgccagtgcactacagacaagtagacacatggcactcatagtgccagtgcactacagacaagcagacacatggcactcatagtgccagtgcactacagacaagcagacacatggcactcatagtgccagtgcactacagacaagcagacacatggcactcatagtgccagtgcactacagacaagcagacacatggcactcatagtgccagtgcactacagacaagcagacacatggcactcatagtgccagtgcactacagacaagcagacacatggcactcatagtgccagtgcactacagacaagcagacacgtggcagagggtagagcttcagaggagtcaggaaacaccaagagtcagaaaacgcacgcttagattctggctagctttagaaagaggcagaaaaatagaaaagttgtgcctttttaactgaggctccagaatggcacagaccccgctaaatcttctagaaccgcagtggagaacaggaaaccttgaggggagggctcatggtgtagcattaaaaggacaggtattctgctggcctatctgtttaggatgacttaaagtgaaatctcctttctagggtggacccttggctcagtgattgacctagctcaactgaaatgttaggtctctacccaggccagaaattctgttctctttactgagtttattcttagtgggcctttattgtaacttaaacacaatctatatataaacaaaatcacaaggttatgaatattaaataaagcaagaccttctagaaatgtcagagaatctattttcatgaagtcttaccagcatggctgcatgaacaatacctaaacaagggcaacagcaacatggaaaggggaagtcttaaagggcccctgactctaggcaaggaaatacagacaaataaagaagaacagaggtaaaagttatccccagggaagaacacagcaatccaatagcaaatactcagcccccaaaccacagaacaggtgctatttatatagttagggaaatatatataaaactatctacatatctatacatatatgtatacctagatagagagatagatagaagatagatagcatgggaagaactggaggcaggaaaggggaaggcaaaacaagtatattttaaattcaaaatttaaaaaaatgttttaagaatgaaaggaagatgtttacagagctgagcactgaggagagtgggctgtggctgtgactgagagagaagagccagccttgccagctgtgatgtaagcatgtggattatgtaagacacatgctctgataactttcagagatggacaggagaagaattggtaagagagttacccagatcagaggcctggctcttctgtcctctcttcccagttcatttccacatgtgacgtgaacaacaggaggctcctttgctaaccctccattatgtactcagagtatttgcattcactggcacaagtggccaatataaatccaagtcttccatccccacccccagtgcttctgagctagtcatacaacagggaccctttaaaacactggagcttagaagcagagagggatcacttccccagacttctcccttcacacatctgggacttcttgggatttcttgaatggcatggctaatgacttttgatactaatcaatgcaaagctaattaatttccttcacaattttcatgtactcagactgcccaagggttcagacaatttgttgtttttgttgtttattgtttgtctctcacctttcaggagcctcctccttgtctctcctttactaaaggactaattagctcctgatgacttgatctgttggtggaatttggactgtggctgctggtggtagtattgcttcctcttttgaactgtgggacctttgggacatttagaataggtggaggaaaatcatccatgtgtgtgctagtgtttgtgtacgtctctggttttgtgtttctctgtgtctcatccacacatgttgataaatgatagaatgggatgaaaaggaaaaactggtccacaaaaattattctcaactttgatgccataaactctacactgcccagtttaaaataagaagcaagtctggagagatggctcagccttccaaactgagtgatgcctttgcagaggacccaagtttgattccaagcacccagttagagactcacagctgcttatagctgtaggagatctgactccctcttctggtttccacaggcaactatacccacatgcacatatgcccacacagaagcaaatgcatttacattattaaaaaaataaatatgcatacaagaaataaataaaataataagctgccatgatggtattagtcaaattatattgaacctttctttgattttttttatttatctatatatttaggattttttatttatatgtggaagtatttgaggattacttcatggaccaaagattacacttcattttacaatagcataagtttaatatagcactcatagggaatgtataatgcaactgagcaataggagtctcattggcttggctgcatttgacattggctctgaagcaaatagggaagagtgtgaggtatgcatgctacttgagtctcaagatctccaactgtagaatgagatcatgatattctatgctaagcataattgttcagacaacaggttggtattgctgtgcacttactatcacagtcccaagccagaatagcaacagcacaagtgcacaggtgtgctaaccaccatgagatgaacagtgacactcatccattgtaggtggaaacagaaagtggtacaaggctccacagcaggtgacccaacagctggattcttggggatttaaccaaaggaaccacagacctaagtctgcaaaacctacagcagtctcgtgcatgtgtaccaaagttggaagaaaacaagatatcctgagaagatgaatggaaaataagctttgattcatcaaaataatggaatattacttaagactcacaagaaatgaaatattaacccatgaaagaacataggggagagttaaatgcatattttcttttgttaatgtgtgtgtgtgtgtgtgtgtgtgtataatggtctctgaggatggaactgatgtccctttgcttgcaaggtaagcactttatcatataagctatctccatgacccaagtgttatctaacaaggcaacatgctatgtgattttaaggatggaaaaggcaaacttttcagagaattcagtaagatcaatgcttactagggtgttcggggagaaaggattaatacacagcacagaattttaagggcagtgaaactgcttggtatgctactatagtgttagaagtatgtcatttgtacaaatctaaaaattatacaccacctagagaggaccctattaccaagtctgggccctgcctgataatagtgtatttatgtggattcataaactgtcacttgtcccactctgtggggaacattaatgatagcctaggtgcacagggtttatatgaactactctgtcaccttctcaatttttccatgaactgttacttttcttttaaaataaccagttttaagtgagttaaattcatgtagaatgtgcggtatttctcagcacccaagtgtgttgtgagtgcttgcccagttactgatggccctgtttctctttagtagtccattcccttgttctgttctctaccccaagaacaaaacaacaaaaggagagtttacaaccaacctccatggaagatctccaacttgtttccctaggaaagtggagtgtggctagctggagggtcatatggtggcaaccaagactctccctgcattaaatgattctatatgattttcaaaagctgcccagtataacagttttgtaattaaaacacttaaggacaactaacctcagtttacagtgtgattcttagctttgactatgtagactactatagcgtgcattaaaacaagataaaggtgtaaatcagagctgtgttgacaggcatgtgtgcctgctctttgtgtcttagttggaaaagtcagtgatttgttttttaaagtgatgactactgatagaagctaaaaggtgcctcagtattgaagtacaaaatcactaacaaaataatggtcttggcaccactgggttaagacaaactctgatgagaactgcagttctcagagtgacatctaaaccattttttgtaagacactaattgtccattgagaacactaacttgacccatccagcaggtccagttattcgagggtctcgaggggacctcctcctaataaccaaattggggggggggtagagagagacgagggccttgtgcgaataacgcacaacggaaaccgttctggaatgcatcaaagccccaaatgtattagccaggcccgaggtttaaatgcacaagaaaaaggggaagtgcctttcagcaggaggaatggggcagaggaaatgcaccttagcaggagggatggggcagcagaaagagaggaagtacttctcagcaggagggatggggcagtgggaaatttttcttttggcgactacaaggggaagcaggaactttgtggtatcagagtacatcttgaggtcaggacatccggtgctgactttctcggagcggtgcgtccagtggcccacttttgacccctttttcttctggggatggggggagaggcccaattcagagatcaggacaatagcattgccttaatagctcccaacactaactaatgtgtgatttggtgtgaacgggcttctctgtagtagagacacagagaataaagctaagcatttctcagattgtatcaaatggtagttgaacaggcttgaagttggttagatctgggctcaaaccccagttctctcatccattagctgtttaaagtcagcaaagttgatatgcctctcagacctgcttattttgacttctttaaaacttctatttatgcaataatacttgtgtgaagatatatgtctacatgagtgcaacctcttagaggccaaaagaggccatctgatcatctggagctggagttacgctgattgagagccacccactgtcggtgctgggaactgaaacgtgagtcttgtggaggagcagcaagtactttggtccctgacgcatctttccagatgtcagaggctttgattgttcataaaatggtgttaaaataggcccctcatatgaaagttgtaaagataaagtataacaagccatgcgaaactccaaacacagttctgacccacaggaatgacctgtttatatgtctagtctcaatgttttctattaaggactgctttttaactgacatttagctagtagctaatgagctatggaagtttgacttgatgaataattagtgagttgaacaggttttgtgctgtgaggatctctgcagcctttcctcccacaatcatcctcaactgtacattgcatgtgtgagaacgttgaaaagctcattgattgcactcagtcagaactatcatgtcccaagaccaccaagaaccatttatcacaacttcctcatcaatgccctaatcccaaataaaggagagcccacctttaaaattgggctttgtcctgaagcccctagtaaacaagactgggagtgttagaagagacactgagaatgagccagtctctcctcaggaatggggcctccagtagcctaagagatctggtcagacagtgagtttgtcctccccacctcctttgtcatcctctgtgggtctgctttctgcctgcttgcagtatacagatacagaaagtctcttgcttatgtcatgcctacaaggtgccttttctcagtcatgcatgaaccttccagtcccttgttcctcatgtcagtgactcctgtggtggccaggttttctgtccctaactttgttgttgaggaaacctgagcttgcattgtctcattgactgtagaggcttaacatttccctctttccctctgtgtgatgggcccacctttattgcagccctataactgaagaggcaaaatggaccacattctttatggaggccttaggtctttcagggtcatgcagaatcttgatttccttttaacaatacaatatcagaaaacagtgtagcattccattaccctaacaaaaatcactcaaagccagtggccctccagaatatttacacatctgcaaattatgaattaatggtgacattgatgaagaggccaagctgcaaattcaaatctgctagggcattctgcagattaaaacatccatcccctgataacggaagatgacagtttcctctcacttaggtgtaaaatacatcatctttgcttctgtaatttacaatgaaataatgaatgctttgtgttaagcccatccccttccagggaacaggcattcacccttctaattcctattgaatgaatgaccagaaggcagggggtgtcatgttttcttttagcccaaagagattttcttaaaacagaaatataattatatatgtacagaaaactatcaagaaccaatgtgtgtttgcatgtttttatgcatgggtgttcagtagtaaatatttgtgtgtgcttgtatgtgtgtgtgggtgtgtatatgtttatgcatatatgtatacatacacttacacgtacacatatacatagactatacaaatacttgtgtgttctcttttcaccatggtgaaaactcacttatacaactagggcttatactcagtaaaccatcttgccaaccttgtatttttggaaaaatgctatgttttgttcatttgtttgattaagcttctttcttcgctgtggaaacaccatgcgtttcattctgtgagctgctcattcactgtgggatcaattcaaattattttctttttgccaatttgtcccatcattgtggaggcagagtctttctgtatacctctggctactctcaaacttataatcctcctgcctcagcttcttccatgctggaattataggtatgtgcctataattaatacctatataatacctatatagattgacctcagaataattccccttcattttgaatattctgcagccttgctggtagagaaactggaaaccaaccagctccttcctgacacatttgtctcttatcctgttccttcacacagattcagggtaactgctggcttgcttggtgaatggattgctagttggcctttctcttctccatttttcctgtactttcataactaaaagacagtttataggccaacagtctaatttcacctccggaaaagtgtcttttcagccacttgtatgttccctgcacaaccatttcatcttctttttgtatacttaaaaatgggagggtcctagttctgaagaagcaaacatccatgttagccgaggagaatttgcctatgcaggaacttgaaggtaaccgctcataggaggtcactgtcctaaatagaatccatgtgataacaggatttatttaatttcagatcaagtgatatttgaatgagcagaaatacaaggtccaaagagaactgcagatatgactaaatactcaggatgaacgataagcaagactctatgctgtaccttgtctcttgtgtattttattatcactaggcatggaagggattttgttctaaatggtgctgctcttggagaactgttgggtagtgtttccatggcagcacactgagaaagaatcttagccatcaggttatatggagtcaccactgtataataacaaaactagaaagacttgccttcctgtttgatcacctagcattgctaaggcatccttaaacatcagtactttggagcttccatgagcaaatgtactgggttaacacaaatcaatcattattatttttgtagttttaaaaacaatttcattgtttcaacattatttaaaacaaaaaggtttcagtattattgaagttgtttttaaaaaaatctagaaacctatcaaaggtttaacagtctatttatcttcttggcaacccttcataaatgaaatatgttaaagtacaactgaggagaggattctgggaaaataactgacagggaagaaggagaattccgagtccttccatagacagcaaccacactgatagaagctgtgtggtataactgtgtaggatgagggctcacatctctgtggaaggttcagacaatacattccacgttaatttgaaagaactttggcccttggcatagcagaaaccattcattcttcccatttctacttttttcttctgtagctacttttcatagtattattttgtgatttctgtttcagttcagttcattattaatttaaaaaatattaacagtttctgtcagctgatgttcctttgtatcttataattttattaaattcaccagtcagttctaacacatgcttgactgaatctttagttcctgttatctagaatcagaactaattttccctcctcatttctagactgaaaatccttcaattctctctcctgaatattagctatggccacaacttatattgtgctgagcaagattgttagaggctgacactcctgtcctgttccagagcctgaaggaaatgttttcagtgtttcctgtgtgatgtgatttcagctatgtgtttgtgatatgccctttattatgttaggaacattgttgaaagttattactagtaaataataacagtgtctcacagctgtgtccaaactaaatggaaaggctcaagatacctaccagaatcctttaggaatgtcagatactaaccacccacaccaaacttacccccactgtaatctcatgagaatatcaccactcttagaagattatccttttattaaaaagataagtctgaattcaagatttcaacatgaaatctcttaatttttaattgttgggaatgaactcaatttctttttaatgcattgtcaagatctagctaatcccaaatctcttctgctaaatgagacatttgccattattttattatcataaagttatatttttgacttgggaaatggctccattgggaaaattcttgctataaaagcaagaagacttgagctcagatttccaacacccacacaaatagacgtcaacaagaaagttagcagctgaaatagctcagtgggtaaagacgcttatagtcaaggccaatgggctgagtttgatcctcagaacatacttggtacaaggagaaaaccaggtcccataagttgtcttctgacatctatgtatgtgccatagcacacacgtgagtgtagcatacacacatacacacacacacacacacacacacacacaccttctaaaagttaaaaaaaagcaatatgatgaagtaaataaataagccaggcatatcaatgcatacctataatcccaatgctggtaagacagggcagtttctgagatgtttaagctggctagtgaattggaaaattccagattcactaacagaccctgccttaaaaaaaaaaaaaatgaaggtgataatgattgtggaaaacacctaacatggaaaagctacacacatggtcgtgcaagattatgtacacccgagcataaacagaaacatgtacacatacaaataaagaaaataactttggaagttatagttttggctctcaagaagggaatttagggggaaagaatctgaaagatgggtcaagtacttgtcttcaagagaaaggtggaattgagagcctgcccttggtgattacttgaaccgaacaagaaatcccaaaggtgatagctctgccctctggtaactctgcctgtggccctagtagccccatgttctataggctgggtattgaaaaaaaagctttaaactaaaagagagagctgagccgcagtggtgaagcactgggctgtaatgaaggaaatcatcctcctgacagattcagtggggacaactctccatggggctttgtcacttcaagcctttaactcaggcctggaagatgtgtagaaaatgcttgggccagaaaggacaaaatgtcctgacagattcccaccccatccccattcatgtctaatgtcaactagcttctgaatcctaccatgaaaacagaccttaaaggccagaacttgacctttcagaggagtttctagagaacagaggtaggtggtacagggctgagttggtggtgacctactgccttatttgctataaattttggtttgccttgttttgttttgttttgttttgttttgttttgttttgttttgttttgttttaagacaaggtctcatcacttaatctcgatgtgtaatccagggtagcctcaaaggcacagagatatactgacctctgcctgctgagttctgggattaaaggtctgtgtttccatgtcaaccccagtatattgtttttaaagggctgggtgctgaatacttagagatgactgtgatccttctcctcaagaggattaaaaatatttgggcatgctttctttaaaactgaaataactctcatataacactgaaatgatgcgaaagatactacatggagcagtgaccatcttttttcctttcctttcctttcctttcctttcctttcctttcctttcctttcctttcctttccttttcttttcttttcttttcttttcttttcttttctctaaattataagttacccaaatcacagctatataaggaaaatcagtcaaggtagttttgatttggttgaagcatggacagtaggctggatggagatctaaattttctcttccacccctgcttctgtataaacacctttatcaaaactagggctctacaaaagatgcacagaaaaactctgggggtaaatgtgtacaaaaatattttataccttgaaacaatctacaaagaacgttacttttatagctattttataatattttatatactattttataaatagtatctctattttacagctaaggaaaccataacatggaaggggttacacaattcacttaaatgccttatgctgctatgcatttaggagttaggatacaaatccagtagagcaagcattagtgtctcatgtagaggagaaaactgaagaaaccatgggccactaggagctgagccagatcctgggatctcctagaaatttgaatctgtgcaatcactctctgacagtacaaggatgaggggaccagatatgtgactgtaggtagagagtgaagctgaagtcagggagcctaagcagagtgcaaagaggctttggaattcactgaagaccccactgctcgcagatacaggccactgtcctggcctttaagtttcattctcttgcccacagtgatggtttgaatagaaatggctcccatgtgctcataaatttaagtgctttgctcctagtttgtggactgtttaggaaggatttgtgaccttgcttgagtaggtgtggctttgtaggaagaggtatggagacaggctttgatgtttcaaatatccatgccagcccccagtgtccttatctctgcctgctgattgcacacaacaatataaatctcacagctactgtatcatgtcatgcctgtcttcttcaagtgatgataattatagactaacccacaaaaactgcaaggaagcatcccccgaaatgcttaagataacaagagttgtcttgttcatggtgtctcctcatagcaataaaatataactaagatacccactgtattggctggttttgggtgtcaacttgacacaggctggacttatcacagagaaaggagcttcagttgaggaagtgcctccatgagatccagctgtggggcattttctcaatgagtgattaagggcggaaggccccttgtgggtgataccatccctgggctggtagttcttgagttctataagagagcaggctgagcaagccaggggaagcaagccaataaggaacatccctccatggcctctgcatcagatcctgcttcctgacctgcttgagttccagtcctgacttccttggtgatgaacagcagtatggaagtgtaagccgaataaaccctttcctccccaacttgtttcttggtcatgatgtttgtgcaggaatagaaaccctgactaagacacccactgtactgcaaggccttggacagaaaataaactgagtgtcatgaaaggagaagctagagccatggtcgtgcatcaagagaggaagtcagttctcttaagatgaaataaaccaactattgcaaaccatattccatgagacatttgtaagagatctcctgaccacatgttttagttctagagatggtaacttaaagttaatcagatttctgtgctctggtaccactcagccatattttcaatagaataacatgccctgaaaactgcccagagatgcctttagtggagtaagtggctgaaaatttggaaacacctcttttctcataaaaaacttactttgtgtttctccaagtattagtattgctcaaaatttgcttgcagaaatggttatataagcatctactgcattaaggattagaaatagccccaggacaactaaaaacttactatgtaggaaaagaacatgtcttaattatgagcctgggccattctagtctttgcaggagtcacatttattcattgctcagacctggctgtgctgtgcacacacacacacacacacacacacacacacacacacacacacacctaccctatacataccctagcttcgattctgcatttcttttgataggcagcttccgctgagccactgtgtaacacttatggcagtggcagaagctatttctccctactagtaaaggaaggaagtggctgcatgtgttaacagcctgtactcaattactcaaaaatttgaattcagcagacagtccaaagcagcaggtccttgagcccattcattccataataatctgaattcaaatgacattcctaaaaagggagtgagccacatccacacacaggaaaacccgagggccaagtcatctggcactggcacaggtcagctggaagaaagaaaaaatgttgagtgggttcattgggtgctatggcatccaacatccttgccagccagttgctatctacttactagatctgtaactggatcagatgaaatagtacaaatgtgtcagggcagcaccaagctttgaaaagtctccgtgtggttcatttccttccttgagcagcaggtacaatacatgtgaagtcccagtctaacagtatggggcagtgcagaggagtcagcctatgaaacctggagaatcctgcagaatagcttctcattgcctaatgtcctacaagaacccttcttttccctgctaagaatgagcaggtccttctaatattgaaagtcttaacctgaaaatcttacctccttcataaacttaggggaagactgtcttgagtatggcagcaagatatttgacttgagtgatagggagccagacatagtagcaaagagttaggtgctaatgaagacaatggttgcttgggtgtttggtacgcatcttccccaaggggacttttgtgttcctaccatactctcaagctgtcaaggtacctttttcctcactgctgtttcttaagtgaatgtaccacaggactaaatttaatcatccaatatctgatccattaaagcccaggagtttcttcatagaattacaaggaactaatcagtgtaatgagccagcggtcttcagatatgtaagcgcatgtttctaatgcagctaggaggagatagttttctttctcacagaaagcaatgatacttgggatgggggttaaatctcaccccagcaaaggaggaattttgagctcatctaggagaaagacacatcaaaggtgatttattcaagcctcaaggtcccctatctgttgacttttggtaggttggaatgcaatcctttgtgtatggaaactcccagctccgcccataggaattgacttgctaatgttagtcctgggtaatagccgaaaaaatgcttaaaaacattctagcttcagcacaacacttcttcccccctttgtcactgcaattacagaaggaatgatccacacaaatattcattaatagccaaatgaagagtaggaaggagagctttgtgtgtgcacacaattacctcagcacagatagagggaaaggctacaaacctccactgatgagcaaaggaacactattctcactttttgtctgcacctaaaaaagagtttatgttttgtctgacatccaaagaattacccagaacctaaaagcttagtccattaaaagagaagagtagaaaatctatggtaatgactattttggcccatgctgatgagagccagaggattttgatccacataatcaatgtgttgagaggagattgtaactcttagggaaatactgactttacagagtcagatggtaaggggactcacagggcaatctgtgcatgggtggtaggggactcacagggcagtctgtgtgcatgggtggtaggggactcacagggcagtctgtgtgcatgtggtatctagtatgcatgtaaaggtgagttgatcagcttcagcttgagaaaagggcacaaagtatgagtagttttaaaacacttgggaatctgttgagaaaatccactctgtgatttcccatgattcacttgatcaaaattggcacaggcagatagaaatttagacatgtatgtctccagatttgtacattgtacaactatattttattcacctgatgtaattgtcctctccaaggcttattgcctccatctgctaacataggcctggaagcttctaccctctgtacaatctaatgtaggcctagaatattttcagcctctgagactagctactgaataagatcaccccttcctagttctttctgagctctggcttgctggctgatgcaacatagttgttttggctcaaactcttctccatgctgtctgatttgatctgacttcttttggcttctcctgaattgctcagcttagcctcatactaactttggcaatatgttctaatcttctggctccttattctgtgtctagtttgttctctcttcaatctgtgtctatacaattatcccagtaaccccccctcctctgtgctgctctcttttaagttacatctctatgagctctgttcttgtgaaagttgagcatatcctattttctcaaattgttctctgattcaccactttgtctgccactcagttagacatcaccttcaaaaatgggtgtttctttctacaaactaactttaccttcattgttggtgattaaagatgtgtactaagggcatgtctgtattccagccagagggattaaaagtgtgtgctaagactgagtcacaccacatctagaaacaggtttttccagtaaccaaaacaatttcagagttcaccatgtgaccaaatgtcctgcaacagtatgctgacagatctttctaggtatttgtatttatttttctgttacagacagaatgcctatgtccctctaaatgagttgaaaaatgttgaaatctgggccctgttgaaagacccacaatgtgaggactcctccacattctgactcaggagagtagataccccaaatcactcacaagaaatggtcttgatgcaaactgcaagaggacttttattccaggcacattctgggacccacagtcgtacaccacgcaggggtagaggaccatgggccccaagtagctggtacagggtttatttaaaggaagaaactaaaactcaagggggtagggagggtgttgttggaaaataccaaaaataccagttaagagtcactagggagtgggagtcaagacagtttctatgagtctctaacaatagcatatttgcattgtgggttcctggagtggtcagggcaggtcagggtgactttcttggaatgaacactccccgaacccaggaagtgggtgggtggaggaatgtggctacctgttttatgattagcataccttagggcattgagtcacaaaggtcatttctcaagcttgggcctaaaggcctagtttttgtttttatgttacacttttttcactgtcatgattcccatgataatagaacctcctaaatgagacttgtgctccaagaagaggtagggaagctagcttcctctctgtcctctgatggtatagtgagcatgaagtcaaaactccactccataatctctagcatgagataggccttcaacagaatacaacaatgctaccacacttaccagtcctcctgctagtgttaaaacacatattttgccaggcacagttttacctctatgcgttatcatttaactacctaggacatctggagtgctgtagtggactattttgggatgtaaatgctaacagttaacaaaaatcaccaaaagaaagtggacaaactgagtcagcatcttagaacttcctgagttctcacgtagtatatatggccattctagtcacaaaaatactgctatttcacttgtttctgtggacattgtgtggacagaggtgtgattagaaacactttatgaggtactgtattgatttctggctgaagtttacctgggggtctggttaaaattccctagtatttcttgtatttttcattaaaaagtaccatacagcggactcttaatgaaacaaaattatcatttcatagttctgaacactagaaatctaaaattagggggttaatagtaccaacctccctctatcaccatggggagagctatcctttccccctggctcctggtagttgccatcaacctttgctgcttcttggctgaagctgcatcaacagtgctttgatcttggtcatcgtggtcatacgatgttctctgtcttatgactctatcctccttcccagcctttgtagcagaccacttgtcaggtaaaatgtacatcttcacttgcatcatgtagcatacttccttggatcttttaacacaagtgggcctccaaggcctcaggttttacttcacaatatctctattttattattatatttttttcattttgagtgattataatctagttacaccatttctcttccttactccaatatctcccatatactctcttgcgtgctcagtctgtataatgtttcttgtatgcatatgtctttagagctgaccatttggtatttcataaccaatcggtgtggtcttccctgagttaagagtacttccccaacctcagcattcctgagctgcctagacttctttggttagggctgaggtctcgtgatttcactttggcattctactgatgtcatccttgtgcaggtcatgtttaggaagtaatgttgctgagacttcattgttatagcttctctgatagttctacaagacacaatatcaaagcaaacttcctgatcctctggctctctctatctttctatctcctcatctgaataatactcaaaccttaggtccagaagtagtgttatagccatggcagttgagactaggtttcacaactctatatgtttattccttgtgattttctgtgatagtctccatagtttgtaatgagatgtttcctttatgagaaatgagaactatacttatctgtgagtatagggcaaatatttagaatgtaattggggattatgctgttttaatgaagtggcagttatatgttctctaaaaagatccatgactttatgatccctggttagttggttaggttttcagcactaggcatgatttccttcctgctaagtgggcctctagtctaactagagacatgtttgttaccaccaatatatgtatgtcactgttgcatcgttagtattatcatgccctgctggtcatttttgctacctcacagcattgcttgattctatcagtgtttagtaacttcacacatgaataggctttcatttaatataataaatatagccttacacagattcaactgaaaatgaagcattgactttgtttgttaaataatctgtgctaaagaatttgttggatatggcaacaaacaacctgaaaaagtaagtagtaacttcttactcatagctctgtgattggtgatgaatctgattcatatgtgtttacagtcccaagtcaacagagaatctcttcctctggtcatgctgccttgatgcagaggacatagtacaacaatttggatgagtccttagaagaaacacactcatatttatattccaaagaacaaatcaagttccacagccaacttagcaataggatgtatcccatttcaggtaagggagaggtgctccatcctttacttagagccagagaaatgggtaaaaacagaaatacagcttgccacaagagacgagattaaatggtagaagctaagcccctatgacttaatggttaataaatgcccagaaagacctagaaacagcattagccttatgatttgtacatagggctcctgaaacagactctgtccaacagtctaattatgatagagcataaagtggttttcatgaattagccacttcttccaaatgacaggagttaagtaagcatgtggaatggtgaaggctgcccactgggctttgaaatgaaaggaggtcaaggcttcacccaaataagaactgaggccaggagagagctaaactctgtgagaatctagtttatggaccaagtagcttgaaatccagggtgcacatcaggaaagagggcaggtcacatagtcggtaaataatgagttagcttagccagggagaacaggctgcactcatgagaacaaataacaagattatttattcagctactcagaagaagtaggaccagtgcttaagagtcaaccatgctctgctgtccctgagaacaatgcatagtcccttagctattggccataaatgaagttctagatctggcgtcaatggtgaacatgagtttgtaagctcttctcctaccattcgtatgagtatatatgtactgtatgtacacatgcctgtgtatagacatatagaagccagagctaaacatttggtgccctatgtcacatagcgctaacaacaacccaaagcctgtacctttagtccccgcttaatggtccagaaggtcctctcatacagcatgacatctcagggctcctcatattacttggagtcagaggttgcttcagtgtcagcattaatggtctcagagacttagtccctctctgccttattccctagaggcaaggcatctcactgaacttggagctagctgtttcagtcaccaaggcgcagccatcctcctatctctgtcacccttaatgctagggttacagttgtgtgcatggccacacatagctttctataagggtgctggaaatttagctcaggttcttgtgcttaagcagcaatgcccatttcccacggaactatgtccccaggcaaagtaccgagtagcaggttgtatgtgattttgcccagtcttttacatcagtaccaggaatcaaactctggtccttacctttgggcagcatgtctatacaaatccctgagcaacctccctagtcatttgtacactgattaagattattgagcaggcagtgttccaggtttgcagttctctgagactattacagattacactaaagcaactgcaagttgtaaacccagtgccctgatatgagggttgattagtgtgagcaaggagatgacacgatgtatctgataacattctggaacagtagccagtgactgagtgtgcaggctctggagtcagggaagtggtgtctcttctggatttggtgcctctttagtttatacaaactgcttgtattacaccctttctaatcatcataacagaacacctagattatctctttggtgacactctaaggtaggtctactcaggagcacacaggccacagaagcagcagagcagctgggacagggtcctataggcctacatcttcacccaagagatggggctctccgcagccccctgtgcactggttttgcaaggaaagagctggtttcccaggagtgctaacatagggttacagactcacaggaggaacaagttccagccagaggcagcaagaacatctaatactagacgttaccagatggcaaaaggcaaacacaagaatcttaccaaaagaaaccaagactacttgtcatcatcagaacccagtactcccaccacagtgcgtcctggatacccaacacaccacaaaaacaagattcagatttaaaattatatcacagcccggcgtggtggcacacactgttgatcccagcactcgggaggcagaggcagggggatttctgagtttgaggccagcctggtctacaaagtgagttcccaggacagccagggctatacagagaaaccctgtnnnnnnnnnnnnnnnnnnnnatatctcatgatgctttaagaaggacattactaactcccttaaagaaatacaggagaccacaactaaataggtagaagccattaaagaggaaacacaaaaatctcttaaagaattacaggagaacacaggaaaacaggtagaaggccttaaagaggaaacagaaaaatcccttaaagaattataggaaaacacaactaaacaggtaaaggaattgggcaaaaccattcaggatctaaaaatggaagtagaaacaataaagaaatcataaagggagacaactctggagatagaaaacctaggaaagaaatcaggagtgacagataaaaagcatcaccaacagaatataagagatagaagagagagtctcaggtgcagaagatacgatggaaaacatggacacaacaatcaaagaaaatgcaaaatacaaaaagatcctaactcaaagcatccaggaaatccaggacacaatgagaaaaccaaacctaaggataaaaggtatagatgaaaatgattttcaacttaaagggtcagtaaatatcttccacaaaattatagaagaaaactgctctaacctaaagaaagagatgcccatgaacatacacagaactccaaatagtttggacccgaaaaaaaattcctcccatcacataataatcaaaataccaactgcacaaaacaaagaaagaatattaaaagcagtaagggaaaaatgtcaagtaacatataaaggcagacctattagaattataccaaacttctcacaagagactatgaaagccagaagattctggacagatgtcatacagactccaagagaacacaaatgctctcccaggcaaactctcaattaccatatatggagaaaccaaagtattccatgataaaaccaaatttacacaatatctttccacaaatccagcccttcaaaggataataaagggaaaactctaacacatggagggaaactacaccctagaaaaggaaagaaagtaatcattcaacaaacctaaaagaagatagccacatgaacagaatcccaactctaacaataacaacaacaacaaacaaacaaacaaacaaaaaacaggaaacaacaatgacttttccttaatatctcttaatatcaatggacacaatgccaccattaaacaacatagactaacagactggctatataaacaggacccaacatttgagtgcatacaggaaacccacctcagggacaaagacagacactacctcgagtaaaaggcttgaaaacaatttgtcaagcaaatggtcccaagaaataaactggagtagtaattttaataccaaataaaagagactttcaacctaaagttaaccaaaaaaaaaaaaaaaaaaaaaaaaacaaggagggacacttcatactcatcaaaggtaaaatctaacaagatgaactctcaattcttaatgtctatgctccaaataaaaggacatccacattcattaaagaaactttactaaagctcaaagcacacattgcactacacacaataatagtaggagacttcaacatcccattctcatcaatggacagatcatggaattaaaaactaaacagagacacagtgaaattaacagaaattatgaaacaaatgtattaacacatatctatagaccatgttatgctaagacaaggatatataccttcttctcagcacctcatggtaccttctccaaaattggctatataatcagtcacaaaacaggcctcaacacatacaaacatattgaaataatcccatgcattctatcagatcaaaacggactaaggctgatcttcaataacaatgtaaataatagaaagctcacatacacatggaagctgaacaatactctactcaaataataacctggtcaaagaagaaataaagaaagaaattaaagactatttagagtttaatgaaaatgaagccacaacatatccaaacttatggggcacaaggaaagcaatcttaagaggaaaactcatagctctgagggccttcaaaagaaactggagagagcatacagtagtagcttgacagcacacctaaaagctctagaataaaaggaagcaattcacccaagaggagtagatggcaggaaataatcaaactcaggacagaaatcaaccaagtgaaaatgaaatgaactaaacaatgaatcaaccaaatctggagctggttcttagagaaaatcaataagatagataaacccttagctagactaactaggcacagggacagtatcctgattaagaaaatcagaaatgaaaagggagacataacaacagaaactgaggaaatcgaaaatagcatcagatcctacttcaaaaagcctatactcagcaaaactggaaaatatggatgaaagggacaattttctagacagagactagtaccgaagttaaatcaggatcagattaacgatctaacctgtccatatcccctaaaaaaacccagaaatagtcattaatagtctcccaaacaaacaaacaaataaacaaacaaacaaacaaacaaaaacacggccagatgggtttagtgcggagttctatcataccttcaataaagacccaattccaattttcctcaaactattccacaaaatagaaacagaaggtactctacccagttcattctatgaagcctcaattactctgatacctaaaccacacgaaaacccaacaaagaaagagaacctcagaccaatttcccttatggatattgatgcaaaaatcctcaataaaattctcataaaccaaatccaagaacacatcaaaacgatcatccatcatgatcaagtaggcttcatcccagggatgcaagaatggttcaacatatggaaatccatcaacgtaatccactatatagacaaaccaaaaaaaaaaaaaaaaaaaaaaaaaaacaaaaaaacaaaaacaaaaacaaaaaaaccacatgatcatctcattagattcagagaaagcatttgacaaaattcaacaccccttcatgataaaatcttggaaacatcaaaaattcaaggcccatacctaaacataataaaagcaatatacagcaaaccagtagccaacatcaaaataaatggagagaaagttgaagcaatcccactaaaattaggaactaggcaaggctgcctactctctccctacctattgaacatagtacttgaagtcctagccagagcaattagacaacaaaaggagatcaaagaaataaatattggaaaggaagaagtcaaaatatcatgatttgcagatgatatgaccctaaaaattccaccagagaactcctaaccagataaacaacttcagtgaagtagctggatacaatcttaactcaaacaaatcagtggcctttctctacataaaggataaacagggtgagaaagaaattaggaaaacaacacccttcacaaacatcacaaataatataaaatagcttggtgtgactctaactcagcaagtgaaaaatctgtatgataagaacaagtctctgaagaaagaaagtgaagaagatctcagaagatggaaagttctctcatgctcatggataggcaggattaatataataaaaatggctatcttgccaaaagcaatctacagattcaatgcaacccccctcaaaattccaactcaattcttcacagagttagaaagggcaatttgcaaatttatctggaataacaaaaaacctaggatagcaaaaactattagcaacaataaaagaacctctgttggagtcaccttaagctgtactatagagcaaatgtgataaacactgcatggtactggtacaatgacagatagaatagatcaatagaatagaactgaagactcagaaatgaacccacacacttgtggtcacttgatctttgacaaaagagctcaaaccatccattggaaaaaagacagaattttcaacaaatggtgctggctcagctgttggttagcatgcaaaagattacaaatcgatccattcttatctccttgtacaaagctcaagtctaagtgggtcaaggaactccacataaaaacagaaacactgaaacttatagaggagaaagtggggaagagccttgaacatatgggcacaggggaaagattcctgaacagaacagcaatagctagtactgtatgaacaggaattgacaaatgggacctcataaaattgcaaagcttctgtaaggcaaaggacactgtcaatagaacaaataggcagtcaacagattgagaaatgatctttgccaatcctaaatctgatagggggctaacatccaatatatacaaagaccttaagaagttagactcaagaaaaccaaataaccctattgaaaaatggggtacagagctaaacaaagaattctcaactgagcaatactgaatggcagagaagcaccaaaatcaatcaatcaatcaatcaacatccttaatcgcaagggaaatgcaaatcaaaacaaccctgagattttacctcacactagtcagaatggctaagatcaataactcaggtgacagcagaagctgctaagacacttcattgctggtgggattgcaagctggtacaaccactctggaaatcagtttggtggttcctcataaaattggacatagtaatatctgagaacccagcaataccattcctgggcatatacccagaagatactccaacttgtaagaaggacacatgttccactgtgttcatagcagccttatttataatagtcagaagctggaaagaatcaagatgttgcccaacagagaaatggatacagaaaatgtggtacatttacacaatggagtactatgcagctattaaaaacaataaatttatgaaattcttttttttttaatttggtttttcaagacagggtttctctgtgtagccctggctgtcctggaactcactctgtagaccaggctggtctcaaactcagaaacccacctgcctctgcatcccaagtgctgggattatgggtagaatttatgaaattcttaagcaaatggatggatctggaggatatcatcctaagtgaggtaacccaatcacaaaagaacacacattatatgtactcagtgataaggggatattagcccagaagctcgaaatacccaatatccaatttgcaaaacacatgaaactcaagaagaaggaagaccaaagtgtggatactttctcttctttgttagaagggggaagaaattacccatgggaggagttacagaaacaaagtatgaagcagagactgaaggaatgactatctagtgacttccccatcttgggatctatcccatatacaaccaccaaattcagacactattgtggatacccacaagagcttgctgacaggaacctgatatagctgtctcctgagaggctctgccagtgcctgacaaatgcagaagtggattctcacagtcatccactagacaaagcacaggttccccaataaaggaactagagaaagtacccaaggagctgaaggagtttggagccccannnnnnnnnnnnnnnnnnnnnnnnnnnnnnnnnnnnnnnnnnnnaatataaactaaccagtacctccaaagttccctgggactaaaccacaaaccaaagaaaacacatggtgggactcatggctgtagatgcatatgtagcagaggatggcctagttgcttatcaatgggaggagaggcccttggctctgtgaagattctatgccccagtatagggggctgccagggccaggaagcaagagtgggtaggttggtgcacagggggaggtgggaggggatagggagttttctgaggggaaagaaggaaaggggataacatttgaaatgtcaataaagaaaatatcaaacaacaacaacaacaaaaccccaaaaaacctaaaaccaaaactcaaaaaacagaacacctggcagaccttaagcgaagtttaattaggcttctagtttcagagagattttagcccattatgacagcaatgacttggagatggatactgctctctatatagctagagaagcatgaaggcatgcctcttcacatctcagatagcaccaaacagcatggtctggaaccagactcaggtaatattttcaaagacctgcccaaagtgactcaattcttccagcaatgtcccatctcttcaagtcttcccaacctttgaaattctgcgacaaacctgggaccaagggcttgtaatatggtcctgggaagggctttttattctcaaatcataaaaacttctcagtctttttagtctcagtgtctttagttattaagagaacagtctagggtagtattgcactgaatgctgactcaggtaacccactggagtcacttactagactagtgagcactttggtgattgtcattaccacagacataaccataggatgccagtaattaaaaagaacaatggcatatcactggtaactaactcacgccaataagactcataatacaagtagtcgacaattattgagtgcctttcatgaagcaggaaacatcttcatgagaaccacaagaactaggtcagtcatggtgcctcattttatagaggaacaaatgaaggtgcagaaaaaagagcctgttaagttacctaattacaaagagatccagtgggtatctcctcccacctaagcacccatatcacgtaaaggtaataaatactattgcttcttatgatgtcacactgcagctctgtagctgaaacagtgggttgaggggatcagcatgcttagggtgtggttaatgccagtcccctccctgccttcctatcacagttgagggaaagaggtacattgttatgagaatatcattcctgagtatgcattttgtgtaaatcacccagggagccaatgacccaattaaaaacgttggatgcttgcacagttgaaacttcccagagttcttaatggtgaatctgttttgagaatgtctctattcctatgcaaaaggcaatgctcagaatcatcctggggtgtctggacctgctatagtcaaccatatccctgataatgaggacatttgtgtctatagaaagataatgtgcatttagtgtgtagactatagatagggtatggtgattctatatactgattaattaatttttactttgaccttttttacctgctcgggacaagtgaacattgtgaaatcccagagactttccaacaacctctgattgctttctaaatcaaatataagttttcaggggattaccatgacagcacacatttcagcatcctccaatggggagcccatggtgcatttgtttagcattacagatttatcatactaccttagaacatttctttggaagtcatgtatttgttgccagatctttcttaaaggaaaacttccctagaaactttctgtctcctttgcaatgtggattacttcattgattttataatatttctccaggcacagacacaaaactatctgaattttaacttatgcatcaccatttaacttcagcttactctggctatactgacagtttataaacattatcccaatactctatgccagtttgggcaatcccttccatccaaaccaggagtacaatgcacacatctactgccctttccacacaatgtatggccctttagggccgtacccctttcaatgcagcagaactttgtggtagacaattctgacatctctatatgcagcctctttcctgtagctgcagcagagaagcagctggactgtgacatactactgatgcctacatgccttggcccttaatgtaatacttttattcagtgtctcttggccaaaactggccaaagtggattcacttatcttcagaggtgttggaaatagggaacacaatattcatagaatagtaagtgtttgttctgtactgcctcatcaactcatttggcaagtatagtgaagccttgcaggcatggatgttttaagtgccgtagccgagtcagcatagaaggaagaaagcagggagtctcctggccacgctttacaggtcttctgctatagatctattttaaataagcaaaaaaacaccaggagcatacatgtctgtgtgcacacatgctgctgcatagcacagggaattctgggaatcaaacatatgccatcaggcttagccactacctgttgaatctttgtgcaagtcctccatctggctttaagttcatggattccatagtctctcacatcctcatgttgtggtacagaaatatggggaagtagaaacctagaaataatttaaatcttgagtggtaaatatgaactctttatttagaattatactgtcaaaacccaagtaacagatagatagatagatagatagatagatagatagatagatagatagatagatagaacagattaatttacctctcatttgtgctcacagtttaaaatcttttatccctgttactagctctatttttcaggcaatctggagagattattgtagtttagctatcacctttttcttggcatccagtggttaacaaggacatgtaaataaacataattctgtataaaattctgtcttttattcttatgtgcttcccaatatgcattgtgattaagccaaggtgcatttgaaacactacagattatctgtcttggaaagttttcataatacaaaatgagttccttgagtaaatctgtcttgcttactaactgtctcacagtttatatatatatatatatgggggtgtgtgtgtgtgtatgtatgtgtgtgtatacatatatacatatatacatacatacatacatatatacatatatatatatattagcatatatgtcaagtatatatgcagtatgcatggccacttctttaaacaaaattctactctttaaagaagacatatatagatataatagcacatacctattttcccagtactagaaactctgaaacatgagaattctgagtttcaggccaacaaaagtgaccaaaggagactctgcctcaaaggaagaaagaaattacatacactactcaacaagctgctacattgaaagaatcgcataaactcttagggaagctatttccacaaatctgccttaatcaaacatactggtttttgagtaactcacacattgcttttcttagctgaaagactccaatgtggcacagaacctctgatcaagccctggagagcctctgttggggaagttttgtctttctctgaaaaggtataacgttaaggccagcatactctgtcatctgcaggcataaactgttaggtaggatactcttgcttcagagaataaagaaagatgtcagagaataagagatatatcaaatgttctctgaggattgtagcggaaaaccgaaaattattgatttcttagaagttactgaaccaacacaaaaagtttctatctgtattttctctacttatttatggtacatgccagagggaaattttcttcaatcctggagacaaagaaacaaaaattttaccactcggattcttgtttttgatgactaaatttaaaaaactttgaatatagaatgaaacgtcaaaatctgagagtaggtagggttcaaaatcaaatatcaaatgggacaatcttgtggttaaataccaaagaactggttctatttctgtctttttttttgtatagagttgaacacttgttattctgtgatgctgcctgtgtgtggcttttcattttaattttaggaaagatcaaaagggattcttacctaagtctcttgacatgggagtgagctggctcgctaagtgcttccttaatgtgggttgtgacaagtcagttccaagtgaccagcctgatcaaacgtcagttctacagagactgatggatccagctcggaaggcttacaacaggtcggggtgagtgacagagaacactccaccatacactgctttaatgaaaactcataaaaacactgcccacttacctccttgtatttgtgaggaaagctgaacatttcagacaaccaagaatagttaatatatcaagtagagatgaaggccctctggtattgggccaaactgagtataaacacttgtcccaggaatttctgtctgggcaactttttcttttcttgtctgtgtcttggttctttatctgaaaaataaagactgtgtgggatccgtagcttagtgaggaaatacttataaaacacttacgtacagctgttctcagtatgggcattgtgtgagcatcattattcaccttcgtaatccattgtcacctagcaagatgacatccggtgccatgttaattatagctgctggtgcccaatactttttatctatccaggagactattagcaattaattattgatgttttgtcatagaaatagctgccacttttgccatatctgacttgagatgtcattgtctttctttctctaatttaatccatcaccattgagtgactgactagtatagtaaaaagaaaccagtctaacttatctttgtgtagtacctacttgctacccaaaacaggagaataaattagctgagattctgaggtcgagtgcgtttacacttttgcaaccatgggggcagggcattgttggtacttgatagcgtgttttgcaaagcatggagctgagttcagaagcactgaataaatactagtgtatatatttggtaatgatggatacaggaagaaccctatactgctgagttttaccttagactattgctctctttaattgtgtaaaaggacttttgactctgttgaacatgggacatagaaagacaatgtgccatctctgagagggatccctaaaatgctacaaggtagctggatcatttatgtagagggctcctttggcctgtgttctccagaaccttacagacagactcttactggagtcacacatgctttctagaaatgggcaggagaaattttaatagttacactgatgataggggaccccagtgacaattggtgcacaatgaccacccgtgtcagaacccaacttacataggagacatacagagctgtcgctcctttggtgcctattgggaatgagaaatagagacattaaaggagcatttcctcccagagcctaatacacaataaaacacagacttataataatccttcccatgtgcttaagaaacatcggtgactatgtagacatccttccctcatggagcttccggtcttcaaacatcccagccacaaaaatgcgccatgaggcaatgagcagatgcactggagggaggaaggttgcagaaggagaaaagtcttttagagtttgcagcaggtgatcagggttgaagctgaataaaatattaataaactcattttgttttggatatgggaaagtggtatataattaagctggaaataaccatagtgctcatctttggggaggatgttcaacattggcaagttaaagttagtaaaatgactttcagccttttaaattctgagctttaagcaagaaaacagcccttaagaaattcttgctagttttgggtaatagatacagacatgcaaatatagagactgatggatgggtatctgcatataaagtgcccatgaaaatggccttcattactggatatgcatagaggatctatgttcattattgctgggatctagtcactgtgtgaattgaggctactagttttagtagagggagggtagctttcgaagcctggcccaggagagactgagtatctaattcctgggacccgttggtttctaacccttctgcatgcagggaccttgtaggaaccattattcatgtcaagagtcagccttcctgatatgtaaaatgaagaaggcttttttacaatcctacccttaaacatagcaccttagtcatggttttattcttctgcagaaagagtgatgtaggtgaatgaacatcttttctgagcattcattaggctaggaaacaacgtgctgatggagacctcctctcagataaatgtggccagtgttattagcttcccttttctccatagaggccaaaatgaactaaaatggcctaaactgcagaatttatttctccttcaaattacaacaggactcgactatcctgctagaaactcacagcgcctgtgatgataaatgaaagtgccattaacacccactgaggcccacagaaagttgttctgccaaaaagaaacatttctttcaaaaggaactctagaaagaaaatgacaagatctgaaattaaagatcaaaggagtagggttgatcttcatagaaaatccatcccgggaagaaatatgacctaaagcaaacaggcactactacagcagcatatgcactattgaaaaagaatctacacagtacaggaagggatgcttccaaggtgctggtaggaagaggggaggaggccccagagggagactacagcacttcaaacagcaaacccaggcaaataaacaaaacctgtgctttgttttaccaaaatatactcagctctgtggatttcaaaaagtcctttgaaaatccctttgcagaactagctgcagaatgctacctgcaagccttccctacaggaaatatatgtgaagattttaaatggtatctacaagaaagtagttggccacagaaggggaggaaagagacaagttgttaggggagtggaagtcattagggcaggagtcattgagaaaaggtgtgtgtgtgtggcggggaggagggtcaaaagaaagagtagaactggacatatgaattactttcaacacactatttgatgacctagaatcttctaatatggcgttaacacactgtgggctcagttttcccttaagcaagtggtaagaagtattttcaccaaagctaaatactctcccctttaagaattcttgaagtttttcctaacctgttccatcctatgttttaggagttttactttcttgaagacgaaaaatatgaaatagaaaatttcataaatgggtaacttattgtgttttaaactgaacacaatcatgagggccctgtcactctgtcctatggaagcatgaattatccctctgtcaagcactctaagtctgtctgcctgatacctactggctgctctacttggcttatctggtagactgcatgttggaggtaccctctcacttaacaggggccccaagtccatagtagatggtcaatgtacatacatcctctaaaaagaagccctaaggagctgtctttaagtgaaaggagaaaagtgaaagttcatgattgggggaagggagaatatgttcttagcatgctaaaacccacaatgagaacagatcttattgtatctaatttataaatgaaagtccatcacatgatttctgaatatcgcaaaggatgggctataaaggttttggtactgtctgtggttccaggaatccactggcatctcagaatgcatctcgtggatgtagaggagggttgttatgctacagagttccagacatttgtttgatatgaatattgttgcttgactttgtgtagaataccaaagagcctatcaactcagaggctgtctctggctatgcaaaactataactggcatggaccaagtgctctgtacatgttaaaactgtgctagactctggtcatatgccactgtctccagtctgctgagctgctcctgaggctgcccagctagtgcacatctgagtccttggacagggtccctgacttctcttataattaacttctattgcttgtgctcttatgtactctgtccttttctccccctcctcatctccttctcccctcttcctgttgcatctgtccttttttctctttctccaaatatatgaaacaactgttaaagaaattccatccaaaagacagaagttctcaccttgggtctatggtttggtgctttgggcatggatattagcaaagctggctgagtagctgcagggggccaggaactggtgagccagatttgttttcactgccacacactgtgggagctcaagagaggcagagctctgaaaagcaggacaactccagctagcatcccatctgctccatgggaaaagcatactgacttctgagagtgagcgcttgtgaggagaccagacaaagggaaagctgcagctgcctctctgcaaataagggttatgggattttttttttcccatagaagctactagaagatattagcaggaggtacctagtctccatattttatgcctgagtacatcaaagaccacttctagaaggcaacacatcagctgcttctggctccaaaaatcatatctatgtttgttttttatctaacttctagatacttctgtttatccctgcatcaatgcttaattgttagggcttctcaaaaatttccctatccatttgcctcctcgtttcccctttattccccacatgcgtttctgttgattcagtcactgattctcatttcacattaggaatgctaggattagccaggtgtggtggcgcacgcctttaatcccagcacttgggaggcagaggcaggtgaattttttagttcaaggccagcctggtctacaaagtgagttccaggacagccagggatatacagagaaaccctgtctcgaaaaaacaaaaacaaaaaacaaaaaaaaaagaagaaggaatgctaggattacagatgtggaccactggatccagcttttataaggttactggacagtatagctctcttcctcctcacatttgtgtagcaaacactttaaccactgagctatctccacagccacttgtttttcagtcatgtgctctgtcatggatgtctccaaagcatctctttaccactgtgcctagcaggttatatgccccacgcaggaaagagtcagtgcctacactgtgactcttggtgtggaagttctgttcagcagagctgagctaagagcgggtaaataccaaggggaaaaggcatagaatactaagcactggctattggctgcttccttcctcccttgtttcttccttctttttttccatcaaaatagtattcttagaaggactactttatactagactgtaaatgttgggattgggatcaggacaaatagacataaatcatggctcttgaggtgctgccattggttaagacagacaaataagcagcaatggatatggcgggtcagagtggataaggtgcatcagatggcctcgagagcgctggggagacagagcagaacaaggtcgggatgctgaagccctaacaagaaactggatggagcagtttcttgggttcatacctccatggtattctgaatggtcctttttcttgttgtctctagggtcagttcctttatccgcaggctcctcccaaagtctggtagagtctgtgctttctacatgccaggaggtagaagtatagccttgccaaatgcaggtttcttttgatagaagtcagaagatcattgtcttctatgaaatctcaaaaatatcaatagtttgcttgtgtgatctggagaaaatttatttattgactctactgttcactggctattggctctgagtagggactgagtagggctttcaatgattcctacataacctttgtagttctaagcatagattgttatgtctgttgaaggaagtcattcttagtgctatctgataaggatgaccccagcatcaaaatactttggcctaaacaaataattggcgatgtaagctcacaaggccacctggtctatagtagtataattggactaaaattcaagactttctcctgtacaggctattatgattagtaaatattagaaatagaattgtctttctagaatgcacacacatattgtcttagtccattgttgctgctgtaacaaaatgtcttagcatccataattattaatcggaatacacatcataatgttgtagaggctggaaattccaagaagaatgtatctgcagatgcaaggcctgataagggcttgcactctgcttataaggtgctgcattcctattgtgacctcacatgaagttgaagatgtgtcctcacatggaggaagaaagaacagataagacatcagggtgcttccttcaaccccttttataaaggctccaatcacattactgagagcaaagctctcatgatttaatcagttcttttgaacatttatcttaatactatgagagttgtttttaaggtgtgacattaattttggcaaacacatttaggtcatagcaaatccattgaccgagcaattgataaataatgaagcattcatgttgcggtgtgactccatctgtgatggcaatgacagtcttcctagatttgtgcaattctatgggaaattttctgggaaaccatgagacaatctgagaagaatagcatctccatagaacggattccatgattgtgtttctattttaaagttgaagccaaaagcccggagctcgatctctagaacccacatcaacctgggtggtgtgtggtacatgcctgtaatctcattactgagggggagaaagcagaaccctggcatttactagctagccagattagtcttttgggggagctccaggccaacaagagacctaatggaacacctgagaaactacacccaaggttgtccttttgcaagatataaacatacttgcataaaaatccacacatatatatgcacatatatagccacatgcagacaggtatatgagcaagtttttcccatataaatatgcaaataacctctgcaaattaattgcttaaggaaaagaagacttggaaagctgaagggcttatggtctgtacaaagctatgtgaaacacaaagaactggcctcaagtagcgagagtaagagagaccattgatgaagggaagaacttctggaaattaatttagtccacaccaggcaggaacccactgacatcagcttataacctgggctgcagaagagaagagacaggagacccaagagcttggtactttccacaagagactggaagctccagtctgcttgctgacaggtggcctaatctggggcccataaggagagaatagttctgggctcacccagcaagcatattgttaacagaagctgtacccaataaaagatctatgtttaagctataaaatgcagcagaataagaagaaacacagcagatgggaacatttctacagtgcttcaaatcaacaaagaaaatactttaaaaataactaggagaaacctccagaatcaaaatctctctctctctctctctctctctctctctctctctctctctctctctctctctctnnnnnnnnnnnnnnnnnnnnnnnnnnnnnnnnnnnnnnnnnnnnnnnnnnnnnnnnnnnnnnnnnnnnnnnnnnnnnnnnnnnnnnnnnnnnnnnnnnnnnnnnnnnnnnnnnnnnnnnnnnnnnnnnnnnnnnnnnnagcctcctgcatggggaagactgctttatttgtggagaactctaggacaggtgaccagttcagtttgaggccaagtacctgagctgaaagtgatctcacagaccaagccagaatccagagagtctagcagcctggcaggtgtttgagagcagtacaaactaattccactatatctgaggcactccctgaaaggtctttgtaaagtttgcacttacaaagggctggcagggcacattctagtaacaagtacatctccccccaaaacttacttttgagaattttgaggctttgggttggtcatatttctacagctgagctattatttagatatgcgtctgacaggattgaagagccagactgggtaccatcccatgtttttgaagtacaagtgagaagttactatttagcaggatctggagatttatgaagccttctatatcaatgaattgccctcacttaagagccaccagcccaaatattcacagcctcaaacctcacacatgctgtgtggttaggaaagctgcttaggctgagggtctagatcgaggctgctctgcagcccgcatggtaggaagagaaggtcggctgatccataatggatgccctgtgttcttaaagcagggcaaagtgtaggaggttgttattctgctttgaagtcgcctgtctctctctttggagtggatcaaagcctccttttatttatttatttattcattttatttctttccagaattcatataagctcttaatgcagagcctgcctcttgatgcactccaggttttttccccctattgcaaatcccctcccctccagtctcacactcaaacagcatggcaaggcactgtccttgggttctcccactccccaccctccaccctcatttctccttgtcttccctctccatacctctctcttgctccttccctccctcttgttgtccttttgtcctattttagaatcattcagtaatattcggtctcagcttagagaagatatgcactgactttccaaagctcttgtacagccttatttttttcctagccaaacagggatgttgctattattcctttgttctctccttttctaaaagagaagttagattggaggaaaaaactgttgtgaatgagcccaatggaatcagcttcaaagttgctttggaaactgaagagaatgtgaggcaacatgtattagtggcttgaaaaggctggaggacatgttttcagaatattctgttctcactgaaggccctgctttttttttttccctaaaggttaatgctacaatctccataatgcaggaaacaatacaaattgtgctacccatgtgacagagggtgtagtccacacctctgtttatctggcagagagcaaagatactgcagtcttgtaggctgagggttactgccaatgatatcctttgaatcctggcacacaactcctctgggatagcaaacctacaatctaggtacacaaacaagatacatacatctaaattccattcttaaatcctttaagcaactggattgtaggaaacagaagatcttatagatggcaatttagaaaattaattcaaaaacaccatctgctaagcctcggttcttggaaaacgccaggctctgcagagagaaaggctgggtctggagatagatctcggtctgcgcatatctgcccccaaagcctttttcttctagaatccagggcgactgtatccagacgatgcaaggcctcaccagatgctaagcagtgtggtactgaagagaccctcggtctatctctgggagtcttgtgtaagcatttggcaccttgcttgggatagtctgctattcccaagatccccagagtgtttattaacaaatactgcccaagaacaaggcaatttgccaatctctaaagaggacatggatgtgaatatgggcaacttttctctttagccaaggaattgacttcaagagaggggatgaaaaagttcaaaggcataaagctgatgtgatggagtacagagcccatgaaccttggggaagtgtatacagtttgctgcatatatagcagtgcttcattatctctgtccaaactctttagagggaatttacactatactttcttgtttcataggtcttatttccactaagaaaaataaagcctgtatgtaatgccacatgatcattgttcccattgataaatgtttatgaacatgacataggatcctgtagcccacttcctctaagacctcagcacaccataaagaatgttccttcctccattctaaatcatagtgagggaggattccatgggattataaacccaaagttactatgattactgctgccaacattagatttttaatggagaaataactgctacatcaaattatgaaaaatcatactgaagatgtagtttgtgatagagggcgccgtctgtgtttcagaagttgtgagaccttcctttgctagtctgtcctgattatgcctggcctcagggagaacctaagtatacaggcaaggaaggacaaggggtggggggagggctttgcctatcctgctgagaggaggcagtcatccacatgggtgaggactactaacaaactaacagtttggtagccctgatccgtttacaaaacccaacctaatttttgaattcctttacatcagtttctttctccacggcataaggaaccatggactgtgggtcctaggccttatggcatttctatttcttcccacctcctcactccaaaccaacccagcaagtaagaatatttggggcattccagagaatcacaaaaatctgcctcctgtcaaattctcaacaaccctcccagcttattctttaagctctgaaatcaaccttcctgttccaaagaatatccccaaatccttgctctagcctctctctctctctctctctctctctctctctctcaaaaagccatgaatctggaccccacatttattattaagtaagggttccaggacttatttctcttcacgccttctgctctctgggagcgtgctgactcgccttcttaagttggcagggaagcatgtgagggtaaggcttcctgcaaaccttctcaacagccagaagccacacatttccaaagtgtaaatatgcaacccgtgtctggagcctgagatgcagagtcacatgaaagtgttaaaataaaataaggctgacagagccactccatcagaagcaggcagcgaatgagatgttatgaaacgcttataagcccagggagtaaggtgctcaaagacaattaccaactaaacatttcattaatgaaataatgattaattataatcactaattaaaatgcaggattatgctgttggttttgagcattaacaggagtaatgacattaccatttttaatggaattccaggaatgaaaattatagcaactcacagaaaagacatggctggcaaacgtgattaggagttattgtttaaacccaggggcatagaattctccctgctggtgaacttaagttaagtaagtttaatgtggtgtaatttaattactaagcatagttttcttctcagtgggaagagataccaggtttttgctaagaacaaaaggaaggctgtaaatagccctcagtgatggctggttactaagggggaaatctaagagcattcagctgtcttctgcataatgtttgagggtagatgcatcctgaactcattgtaaattttatttaattaatgctttgaggattaacagcaaagcagaccttgcagcccggaatataaagcttctgggattacccagaaagtgattttccccagaaaggatgtccccattaataattaatgccaggcgttttcataaatgtcagattcccactgcaagcagcaacttgaccctcagtaataaaccatttaagattcattaaagagaagcatcattcttaaactgcttgccatggcacgtgagctcatccataatgtaaaatgttggcattagttgtgttaaaaaaaaaaaaaaaacaaaaaaagccagcacgtggctttcagcaggtggctggagttatctagagaccgcttacttcttgcttccctgtaaggtgaggtctggcatcctttgcctctgtcctgggtcaaatgattttgaaagcagaggggagcctcagaggagatcccgcttagatgcaccaacatcactggcttatggagcttcgagattctctgactcagagcaccagccagtacattgtcaggtgtgcaaccgcagtatgactggcttctacccactggtggaatcccacctaccagactcccactcccaattgcgacaataaaaaacatacgaacaattcatatgtccttagggacagagtctcaggggaatttaccagagtgcattcactaagactctcccgtcacacaagtgcctgaggctgtggtcattcagaatcttagattatcgctttcagtcacagctgtccacagggccaaagacattttgcttttcaatcaggtcagggatagtagcataaggattcaaaagtagatatcacagtggcaatagtgtgccattaaaaccagtcctggtgatctgctttgcaatgtccccaagctgctgtgtagttgtccccatgtgcaaatggccatttccttctcaccatattcatggtggctagtgctgtgggcaaccactgttgtcctgactttttgatgactctagtgaatgacnnnnnnnnnnnnnnnnnnnncctcctttctttctttctttgtttttctctctcttctttttcttaaccagaaaatagtatggtacccaaggaaaactattctcacaattgtcaaaagtctgaaaacaagtcaccgaagtttttcttaataatcaacataggattggttttaaaaaaatacacttttaattttgtctgcatacaggatgccccatgctgtctgaaataaatgagaaaaaatggatagaataaacatggagctctctggaaagtcacttggtctaacacaggcagagaccagtctggcttgtgatctgcctcctttccgttcgtaaatagaatcaacaagagcagttatatcacagccacaaggtatttggtattctcagggtagattgaatgggacataaggggagcagtgtccttacggttgtccaggctgtgtgacagctgacgggacatagcccacacctcagggagagcatgagatggattggttattggagaagcagactggagtgtatgtgctgacgtcatctagtgataacagtcccacttttcctgtgtacaatcacactctggcctgatagcagatcatggtaagtaggagtcctttctagtattgcactttgaagaggcctgttttaaataaaccagccaaaccgtgggttcaggaatcagcaagcaaagagcctgcttggctcacaacctgtgtaagacttattaattcagagagtagaaagcctacatgtgctaattaccaaaactactaattagctttaattataagcttggaaggaagtttaagtgtgttgcatttgataggactgttgaccttttcagtgtattttgggggagggttgagaagcagaaagaaggtgttatgaaattcatcagagagcaattaatttaggtcttctgatgaatgtgctataaattaacacatctgtgcacatcagtccataagggtgctttaatagagtcttcccagtaccaactcccagtgcctcatccggccaaaaagagattctcatttcctacgtaaaatcttattctgctactgttgctaagcaaagtgacaggctgggcacagctcgatggatgcttttatatgtaaatcatagctcagacaagagcagactttgactgattctggagggtcactgagagaacctgtccttgcagacatttgatgagatgcttagaaatctatttcatgccaaggtctggcaatactgtcctgtcagcctctcatcctgtcatagtttcagtgtccctgagccttcctggccagaggtttgagacatccctttcatgtggcagggatgctccatactgtcttcttgcagcaagacagcttcacgtctgatattcccaggaacacaaatgacaggtttctaggatgggcttcatagcctctgcatcactaatgacacccttgcttccaaaagcatgtcacaagctcataaatgacatctgaagccagagctaaccaggcagcttgtggttgcctgctggaactgctgaactctgagcccctttcctctagatctgaaggatctttggtttggttcgaatctctaggaactgacatatgccctagtaacgaccagagggatctcatataatataataaaaaaccatgatcaacatggaataatctctgcttagccagcacacacttgcctacaagacaaggggttagctctggcaaaggagtggggaaacagagtaaaaagttttgtgggctcagagatgagatccctaagaagggagtcataaagacaagtaaaaagatctgccttcttctcattctgaaaacaaggcaaacaaaagagcctgtaggacatcctgccctagatacaaccccttcttattaagtcagggtagtcacactgccctagatacaaccccttcttattaagtcagggtagttacactgccctagatacaaccccttcttcttaagtcagggtagttacactgctctagatacaaccccttcttcttaagtcagggtagttacactgccctagatacaaccccttcttattaagtcagggtagttagagtgccctagatgcaaacccttcttattaagtcagggtagtcacacttccccagatgcaagccctttttattgagtcagggtaatcaaactgccccagatgcaagccctttttattgagtcagggtaatcacactgccccagatgcaagcccttactaagtcagggtagtcacactgccccggatgcaagcccttactaagtcagggtagtcacactgccccggatgcaagcccttcctattaagtcagggtaatcagagtgctggctaaacttttgttcagatgttgaactccagtggtgatgaaatttcatgataagaattcatgtttcccaactttaaaacaggatggtatgattggatgagagcaagaaccaaatggagtaagctgtaggaatttatcctctcccaggtccacaggctgtgaatgttaggtccagctgtcattagagtttgatgttaataaaggttcatgaaagttctggggagcaatacttccttcctttatgctggtctctagtggttggctgcagttttcagcgttgcctagtttacagatatataccttcaatttctgggtatatttatatggcattcttctctgtatggatatctgtatgccttctaatcaccccaaaaagattgagcaccagtctttaaagttatcaattaccttagtcctgtattgcctcatcttaactgcatgtgtcacagattttatttccaaatggggatgcattgtgaaatactaagtagacatggatttttaatagcatcattcaatcagctatagggtccttaatatctctctctctctctctctctctctctctctctctctctctccctctctccccctcacttgctccttccatccctccttctctccatccctttctctctctctctctctctctctctctcttattagttacttcatttaataatccatgtatgtgtgtgtgcctgcatagaggtcagatgtcactctgaaataatcagttctctcttttcactgtaaggatttggatgactaaaggaaatttgtcatgtttaggggaaagagtgcttgcccactgggctatcttaccagctgctggtacatggatgtttgttttcatgccatcacagcttttctcctgtagatacagagtagatctaaatctctcacatggtttacagtcatgagatgaagtccaccctcccaacctagatatgctgctttgacagccttctgagccccttgcctcaacccctgttgtttggtatttattcaaaaccaatatgtgtcctctaaactggttgctgaaaggtatgcttttaatagtttttggtgtgtgtgtgtgtgtgtgtgtgtgtgtgtgtgtatgagtgtgtccgtgtgaccataaaacatcacttttactctatagcccttttatagctaattgtattgcccttatcttcagcatatttatagattgtccctgagtttattgagccaagtcattgtagttaaagctgaagtgatgcctgtttgtccctgttcttctacagacctggctatgctaatggctaaaactatatatcactcagcagaaagctgtgctccaggtcaaacatgcttcagagaagaaaattgcagtgtgtcagggaaattagcaaacaattgtcagcagaaggggtggtggggaaagaacaggaagatttgagatcagcagaaacagctacatatctggacctggtttatcttatagtaaagacttccccaccccacccccaccccagcagtgtagaaggtgatgggaggttagccagagctgtactagaagcagctccatcctttctggcactttcctcatgccagagtcttccgcacagtatagctctattgtgcaaacttgtaatctgcatctgaactgggtacctctcccaggatcctttacaaagcatgctgatcgcctgcaacactatttatggatatgtcataaaaacatcttcagggctggagagatgactcagtcagtaaagtgcttacagaaaaagctcagggacctaggttcaaatccccagtacccacttaaaagcacacatctgtaaacctagtgctgcagggagggcagaaatgggagactccatagagcttctggcatgttactctaactttactgagaacttccaaactcagttagaatctgtgacacacaaaaaaaggtggagagcaactgaggaagacacctaaagttgagccctaggctctacatacatgtacacacaagtgcaaacacacaaacacaaccccctcccccatcttccccacacatcaaaagaacatgcattctattcaggatgctattcatacaaaatacctgtaacaagcaaatccagagtggtggaaggcacattaatggttgacagggttagtggcaggaaaggattcagaaaggatgaggtacaacttaatgactagaaggtttcccttggaggtaatgagaaggttctagagtaataagaggactctaactttttgtcattgcaatatactatgatcatctataaatgtgttgaacttaacatctataaatgtgatcatcttaacggtcgtggaatgcacacagcctgtggcctgcaagttgggcacatctgtatctagatggcaataatagttgtacattgtgaatattctaagtgccactgtattgtagtttaaaatgggtaggtagtaggttttattttatgtatatttcagcacaaaaaacccaatcctgcttatttctgatccacatattagtttcctaccttctgaatgaatccaaactgaagtctgcttcctcttccttgggactaagtgttagttttcccccaacctctaatgacaacaccacttctctcctatgtgtacttcaaatcctgtcctgtccctcagctcttcttggaagtttcttatcctgggaaacctccactagatgtaatcctgttgcttgctttcgcctgggtcttgcgcaacctgggttccagctcactgtgtaacttgaaagacaccatgcaactttctgagccccagttccttcccctaaagaaatgaaactccagagcaactccaaggtcttttcttgatctcaaaacttcatatcctgctaccttgccctggccctggcttttgctggtgacactcaagagtgcattcctatttagcatctctgagtcagtactaattcccatggtgctccaggtaataaagatgtcacatctttcttactggtattaaggtagacctcctccacctcattccaaatatatgccactgtatctgagagaccaaaggagagacttccttaagaccgtgattaaatcctgtctgattaggtatagctcaacatgtcagagtgtaatttcagagcttccttaatatatctgccctttccatagccttcctatttctctattctgggtttgctcatgcagttctcttattaggctatgagtctagggctgactggggctgactgtgctcacctaggagagtgccctaaggacctctgtttcttctattcttacctacctgagaggtgtgttaagggctctctttgtggctactctgcttctacatttgtctgaatgcagctggatggttaatgacaagagaagccatcttgctttatcaagggctttccccttgtcactgtctagatatgaggtatgcatgtctctttcatgatctgcgcgggatagcattgcagtttattccaagagtcactaagtgtaaaatccatgttccacacatgtattctacccccacccctccagactagggatccatgtgttccgcccggctgtgaggacccctctaattcagtggtggtggcaagtagacaacaggatcacatggactagaaatcccagtgtgaatttcaaatgaggatggcaaacagggggtcagttccttgcacatgtcagcttcatggttataggcagctctttctttccttctttctctctttcttctttctttcttccttnnnnnnnnnnnnnnnnnnnnnnnnnnnnnnnnnnnnnnnnnnnnnnnnnnnnnnnnnnnnnnnnnnnnnnnnnnnnnnnnnnnnnnnnnnnnnnnnnnnnnnnnnnnnnnnnnnnnnnnnnnnnnnnnnnnnnnnnnnnnnnnnnnnnnnnnnnnnnnnnnnnnnnnnnnnnnnnnnnnnnnnnnnnnnnnnnnnnnnnnnnnnnnnnnnnnnnnnnnnnnnnnnnnnnnnnnnnnnnnnnnnnnnnnnnntccctctccttctttgtaaaacaaggactattgtgaggtttaaatgggggctacctgcatccttatcctgagagcagtacttggcccgatgctttagatattaccttccttgggcacctttcctcagtggatttttaaggatcctgatggataacctgcatagaagtgaatgtgagaaaaacccaaagcattgcccctatgctggtcagcaaaaatggtcccttgtggggtcacattgcaggcttttctgtgacccttgacccttggctctccttgaaagcagcagttcttttggtcatttgtgggaatcttagaggactgataggttataccttgaccttgatctagagctcaggagagaggtctggcatagagaagttggctgtttaagaagacccttggaggggggttcattcctgtatccttggatgggtctttccttcatttcaatctccatgatgctgtaatgaggaaaagaaaatattcttccctctgctcatcctagcttcagggatggcaaaaggcagcttgctaaaagaaagcccacacatgtctgtaatgttatatgatacaggaaccttctagttacgaagtctagaaggaagggtcaaatgtatacatttttagtacactttcagtgcttggaagacatcacagtggaagtcatgaagaagtgtgatagggaaaacgggatatgatctaagacttaaattgagggaaccagggcaaagcttatttcttcagagtccttgctgtgaacctttgtccattgcctagaaggaagggagggtgccattccagaacaagcaagagctggaaacatttagagaacttcttggtaattctattacttttgcttagaacctatgctatggagaacctgatttctatcaccctcacctacaaaatgaggattgtgataaactttgatatttggatctggaaatttgagcccaagaatcatacaaactaggccagtgtggtgcctgagaggcctttctcagtcacgagaggctctgaaagagtaagtcttcagggcacagggcggctctcacctcacggataagatgaggctttgatctcaagcttcaagtgcgctcccacactttaacttagaaagaaaacccctcttccacccactccaggtagattctcaggctagaaactggccaacagtgagattttgagctcctgatctcagagctatgccatgcactatggttaggtcagtctaacagctagtatttagagaaagctttcatcttggagaaaatgagaagggcagatacccagagcacagtcaactttgggggcagctctgatctttctagaatgagtagtcttatgagtcatgagcaccccaattcctatgcagaagtcagcagagaacaagctgctggaacttccttcttcgagggcctctccttccacccccactagagataaccattttcttcttcacctccttgcaccctgccacacacttaactcacagcaagccagaaaactatggaatggacagggggtagattatatatttattttgtttcttttctttcggtattgttgatgttctgctttgagacagccttattatatagcccacagtgaccttattatatagcccacactaaccccaaacacttgacctcctttctttatgctgggatcacaggcatgggccacctactagactttcgtgacatcttagaacacaggcttatgggaacaattgtaagatgtctgatgtggtgaagcttagacagaatgctaacaatgcctattcaggttctctgatttccttcttgctacaaaggaagcagagatgcatctgatacgttttgtaaaggtccatatggtgcgtgttgtgtttacaaaaagataagggagagaaggaatatgtttggtggtatgtagtcaggtacagggtaagagggtgcctccgtgggcctatggtgaggaatccctcccccctgagggaccagtcataggacagtatttcagtttattcagggcatggggatggggagttgagagggtagtagagacagagaaaggcagggggggagggagagagagagagagagaaagagagagagagagagagagagagagagagagagagagagaggagtagaggctggtcatgagcacttggagagaggggggaggggggtgacaggatagagcagaagtaagagggcaagagcaacaagagcaagacagagcagggtggggcaagcagccccttttatagtgaatcaggtacacctggttgttgctaggtaactgtgggatggagtttagacaaagtgctaaaggtgtggaaggggatttcttggagggcccatgctgagacatcctccccttccccaggtaccagccatgccaagggactagtaaacaatgaaatttatttgggggcatgggcatggggagttgagaatggagtaaaggcagagaaagagaggggacagagaaggacggggtggggcagagagggagagacagagggagagaaggaggagaggccagccagaaacaggggagggaggggaaagaaggggtcagagtaagaaggagaggccaaacagtcttttatagcaagccagaactacttggctgttgctaggtaactgttgggcagaacctggaaggaatgctaacatgctaactacaacctgctgctataacaggtatttagaaactgatttctaaaaaaatactgactcctcacttgagtccatagggcaactaaatgcagagtgggagcctggcagctctaccttcagtttgtatcttccttctgctttacttttatgaattttatttttttaattggatattttatttgtttacatttcaaatgttatcccctttcccagttcccccctgcaaacctcctatccatcccctcttattctgcaaaccctctatcccatccaccttcctctgcttctatgaaggtgctcccccatccacccactcactcccacctcactgccctagcattcctctacactggggcatcaagccttctgatgccaagaagagcttgctgacaaggagcctgatacagctgtctcctgagaggcttggccagatcctgaccaatacaggtacagatgctctcagccaaccatgggactgtgcagagggaccccaatggaagagttaggggaaggactgaaggagctgaagggaccccatctggcatcagtggaaggggaggcccttggtcctgtgaaggcttctcctttactttagtcagagtcaaggctgactctgcacgtgggcatggcaatcactcacaggcattatctatatatacacatggtgaggttgagtctatcacactccccatcaacactggaggctgaaagataccaatctttgtcctaaaccttaagttaccttgagctctagtctaggaagagcaacacaggacagaccactgaaggcagttagctgtcctggaggtggtgtcctgcaaaggacttcagcaggactgaggtagtgatcagccagaccctcattgtctgggactgcttaggagtgtgtgcctcttgctccctgccccgttctttctctttttaaacctagaagattgatttggggttcttgttgcacttccactaggccacattgattgaccctcctttctttgcctctccccttaactgtgatctttaattggcatcttggagatgggtggcagacccagcctcttaggactcctgaaatgagaacacctgccctaaaactgtaaccaaagagccagtcactctcagaggggcccctgaaaccctttcccctctcgaaggatcggagtattttatgagaaagctgttatagggatgaatacacacgtctttccttctgtttaaaatgtttaaagtcccagttctgagaagctgtccctgaatcttatctgtgctcaggatctgtccttaaatttctgctatctctattcattctgatattcttaaaaaaaaagaaagaaagaaagaaaaaagaaatcctcatcttaggcatctcttgctgaagcaaataagagtcattgccggctttctccctaaggctgctttgttcaggtatggttgtccaaggcaaccaataaaagaaaatttggagaacaaagccactttgctttttttggggtcactcttaatagcctaagaaggtcaaaaagtcccttccttagtagggtgcgctgaagactttgctaagtgccagtgagaggcaagatttcagttaaaagcctgagttccccctgcctttgttcctatgcaaagtgtgttgttaagtgagggcttctgcctcgcaaattttcattctttaatgggaaccaggcttcgaggctgttcagcctgctaatgaggcaggagccattctcctggctactatgtggttggctatctatggaagcaacaactcttacaggactaggcattggttaacaacagaagatggtaatacaggaaatattaagggctggtgctatatgttgccaaaggaactggggtgccatttgggggggggggttcttaatctcagtagaaagaatttaagaaagaatgaaggcatgtaaggttagtaaagtctgagacacagcatcaggcaagctggacctctcagcggttctcaggaggagggagatggagaagaagaaagactgccaagatgtttaagttaggtatataggtcagctatgaactacagagcagaaaagctggggcatgccacactgtggagacctactggcagggtggagggaagagtaggggagtggccagtatccaaaagaaagacaaagagataaaatgaaggaaaaaggaaatgttacatttctgtgagttacttagagaagcaatcaggtttatccaagccacaggatggtggcttctgaagtcactacaacaaagataggtttgctgggaggcctgagtatatgatctcaatacctcctatctcttctgcatggctttaggtaatcacttttcctgatgggtggtctctcggccagttgaattaaaaaacccagatgaattaattaatggttttgttggtgatgctgttgtttttttgttgttaccttaaattgctttatatttttctcttattttatgtatatgaatgttttacgtacatgtatgtatatgaaccatgtgcatacctagtgccaatcaaagtcagaagagtggactgaatcccctgcaattacagagaggtgcatgttatcacatagattcctggaatcaaacctgggtcctccaccagggcaacagtgctcttaactgctgagcccagagttaactcttaagtgaggagacaatagtagtaatgcctaaatctaaggtcagaagcagagactattctttagaccaaaagactatcctcagcagagccttggtgtctcccaaaactattaaaatccagagtgggtgtnnnnnnnnnnnnnnnnnnnnactttaggaataagtataacccagtagtaccgtgaaaatccagagatccgattctccagctgttggatcagaaaagatgagtgtctagattggggtttccgtcacaggtctgcagggcaaggtccctgtttaggagcgaagaaaacaaacctcctttctggcattcctggaaagagaaaggccatcttctgctttgggccaagagtagaaactgctcgcttttggagtccctgtccctcaattgtccctgccccaatttctatctttttgctcacatcattgacattaaaatagtaaccttgcctgactgggctttcctgtaagatcatcaatcttttatttttttaaatttgaaagtaacctttattgtaaatgtccatgtaattactccatattcacattttcttttttttttaaattggatattttgtttacatttcaaattctattccctttagtggtggtttcccctctgcaaaactcctaccccatttccccttaccctactcctatgaagggtgctccccacccacccacttactcccacctcactgccttagcattcctctacattagggcatcaagccttctcaagaccaagggtctcccctcccactgatgccagatggggccccttcagctccttcagtcctaactcctccattgggatccctgtgcacagtctgatggttagctgagagcatctgtatctgtattggtcaggatctggccaagtctctcaggagacagctgtatcaggctcctgtaagcaagaacttctttgtatcagcagtagtgtctgggtttggtgtgtgcatgtgggatggatccccagatagggcagtctctggatggcctttcattcagtctctgctccacttttgtccctgtatttcctttacacaggagtaactctggattaaaattttggagattggtgggtggccccatccctcaaccagggggccatgcctaactaatggatatagtctctacaggttctccctcccctttgtgggttatttcagctaatgtcatccccatggggtcctaggaggctcttgctttcctggcatctgagactgggatgctatccctagttttccaccccccattgctccacacctctgttcaatttcctgaccctctgcattctctccatctctcccatacctaattctgcccctctatttccccactccctccttactttctcccaagttcctcccacccttgattatattgttcccccttctaaggaagactgaagcatcaactctttggtttttcttcttcttgagcttcatgtggcccatgagttatatctggatattccacactctttgcctaatatccacttattagtgagtacacaccatgcgtgttcttttgttactgaggatgatattttctagatccatccatttgcctgtgaatttcgtgaagtcattgtttttaatagctgagtggtactgcattgtgtaaatgtaccacaatttttgtatccatttctctgttgaaggacatctgggttctttccagcttctgactattataaatagggcttctatgaacatagtggagcatgtgtccttggtatatgtgggaacatcttttgggtatatacccaggagtggtctagctggttcttcaagaagtactatgtccaattttctgaggaactgccagattgatttccacagtggttgtaccagcttgcaatcctactaaaaatggaagactgttcctctttctccacatccccactagcattctgtctcctgagtttttgatcttagccattctggctggtgtgaggttgaatctctgggtctttttgatttgcatttccctgatgactagggatgttgaacatttctttaggttcaagtttcctcagctgagaattctttgtttagctctgctccccatttttaatagtgttatttcttctctggagtctaacttcttgagttctttgtatatattggatattagccctctataggatataggataggtatgcagcaaaatgctgggtcctgtttacatatccagtctgttagtctatatttttttattgaggaattgagtccattgatgttaagagattttaagaagtagttattgctgcttcctgttatttttgttgttagaggtggaattatgattgtgtgactatcttcttttgggtttgttgaaagaagattactttcttgctttttctagggtatagttttactccttgtatcagagttttccatctattatcctttgtagggctgagtttgtagagagatattgtgtaaatttttttttcatggaatatcttggtttctccctctatggtaattgagagttttgctaagtacagtagcctaggctggcatttgtgttctcttagggtctgtatgacatctgctcagaatctccttgctttcacagactctgttgagcagtctggtgtagttctgataggtatggctttatatgttacttaaccttttccccttactgcttttatattccttcttttatttatgcacttggtattttgactattgtgtgacaggagtaatttattttctggtccaacctatttggagttctgtaggcttcttgtatgtttatgggcatctctttctttaggttatggaagttttcttctataattttgttgaagatatttattggccctttaagttgggaatcttctctctcttctatacctattatccttaggtttggtttcctcactgtgtcctggatttcctggatgttttgggttaggagctttttttacattttgcattttctttgattgttgtgtcaatgttttctatggtatgttctgcacatgagattctctcttctatctcttgtattctgttagtgatgcttgtgtctattattcctgatctctttcctaggttttctatctccagagctgtctccctttgtgatttctttgttgtttttacttccgtttttagatcctagatggttttgttcaattctttcacctgtttgattgtattttcctgtaattctttaaggaattcttttagggcttctacctgtttacctatgttctcctgtatttctttaagggagttatttatgcccttcttaaagtcctctatcatcatgagatgcaattttaaagctgaatcttgcttttctggtgtgttgcaacatccagagcttgctgtggtgggagaactggaatctgatgatgccaagtagccttcattttgttgcttacctctcactttgaccttgcctctcaccatctggttatctgttgtattagctggtcatgctactatggcttgtccctcctgtaagcctgtgtgtcacgtctcctgggagacaagttctctctgggcagaatttgggtatggagagctgtggcacagggtaaagacagaaaccagatggatcctattcctggctctttcttgcttcctgtgtcctgatggctctggacgggtctcccttgcgccaggaatttgaacagaagtggtggtctcgcctgtgctttcaggtgtgtcagcactctcgggagaccagctgtctcccagggggttttgagtctggagagctatggcacagggtcagcttcaggcatagatagaaactggaaggctcaagctcctcattcgtgaaactcctttctgcttcagtgacttggaacaaacttaccatggaaagtaggggggtctctgagtctcttgactctcagataactaacattttgaatttttgaattttccattttgtgaatggagtgaaaacatattcttgttagcttctaaatgtagcaacagcagagatttgggattttcaggattaaagttgatcactggactgatatctgtcctgtgattaatatgcagagatctttctgctagctgggcttgggttatcttagggatatgaattaggagggtgtggtcaaatgagttaggtaaagcataaacctataccattaaaacttcaatagagaaagtgaaatctaaagaagtaattcttgtgtgtctgtgtgtttgcatgtatatatgtgtttatgagtatatgtttatgaggtgtatgtgtgcctatatgcacagggaggccagaggttgatctggatgtcttgtctacaggtgtatgtgtgagggggtgctctctatttgtgcatgtataggacagagatacaatccatatcaccctctacctaattttgtgagacatattcagaccagttcagctagactggccagctagcaagctccaggggccttgcctctctatttccacactggattatagacaggctcttctgaagctagatgccacttttttttgtgggtgacagggatctgaattcaaatgctcatacttggagtgtcttcctaatatcaagaatagattgttttgactcaaattgttattattttctcattagttgcatttcagaccacttctgtctcactgtgagattagatcaatggctatttggctattttctgacaaggagtaggttcctatcttgtgctcacaggtaaaatggtaaaaaatagcagacatgtatgaagtacttatgtctggatagaaagacagaagtaaaatcatataaaaagaaaacatgaggcaaactgtgacccagggcttcctgaatacaaagccatgaagtagccatgtatgaagacaaatgtctcaaaagtaagaaagttacaggaaagtcactgggaactgagcatagactttctaacagcacagatacttggtacagttaattattgccaagcaggcatagaggttagctgactagatatccagtatatagggataaaatctaattcttttagtttctgagtgttgggaagtacttcttaaaactcccatacagccaggcagtggtggcacatgcctataatcccagcacttggaaggtagaggcaggtggatttctgagttcgaggccagcctggtctacagaatgagttccaggacagccagaactgcacagagaaaccctgtctcaaaaaaaaaaaaaaaaaaaccaacaacaacaaaaaccaaacaaataaacaaacaaacaaaaaagacaaaaagtctcccatacagattagatatattatcagatttcagttgtggtaacaaaatgcatgagacaatcaacatataaaaataaaactttgggccacagtttgggggtttccgtctgagattaaattggctcccttactttggattgaagtaggcatgggaaacatacatggcagaaggagatgtcccttcatagagggcaaacagaaaaaaaagagactgttgtcaccatatgttttaagagggcttgccccagtggcttaacttttgccaggcactgcttaagagtgtatcatttcccaatagtgccacaggctgttcatcaaactttgaaacacctggggtttggaattttatttgccatctaaagtataccttcaggaaagccatagaaatgattctgtgggcctgagctggcctgggatttgctaccttgtgtcttctggcccattctaaggagactgaccgtggggactgaccgtggcttacatccaggaacctcagtgaaaacttgcagaatgaagaacatttgataggctttgtagaaagagttcacttggtaaaaagcctaaccaaggaaggataagactgtgatggtaagactgtaaggataagttatggacctgggacccttgggacgatgaaaaggactttgaggacagagaaggcatgaggaagctgccatgaaatatcagctcagaggtcacttnnnnnnnnnnnnnnnnnnnnnnnnnnnnnnnnnnnnnnnnnnnnnnnnnnnnnnnnnnnnnnnnnnnnnnnnnnnnnnnnnnnnnnnnnnnnnnnnnnnnnnnnnnnnnnnnnnnnnnnnnnnnnnnnnnnnnnnnnnnnnnnnnnnnnnnnccctccttttcctcctccccctcctccccctcctcagtttctcaattagaatggtaacatctgcctccatgtactggagatatcctgtagagacaatgttcagtgttgtttctgacacccagacagaccctttgaggagtgaagttctctatgctataataaagtgtgagctttgtgctcacacactgtgatgcttgcaagagccacctcttccttttgccttttcctcgtcttacaagtatatcttcacttatttacttacagaagctaaacattcagaagcatgcaaagaagaaaataaaaatctgttcgcacgaccaacgatgaattatggctgacactatggcagctttgcatttgcacttaactgccatctccccgagttaaaaaaaaaacaaacaaactgttcttggttttgtaaacataacatatacaatataaaactttaaaaagggaagagaccccttaaaacagtgaagcatgaaaatggaggagaaacatttatacctcactattattagcaaattaggtaccaatgagctaggggtacaggccagtgagaaaatgttccctcagcacgtacagaactgtggggtcagtccctagcactgcataacctgggtttggcagcttctaggccaagagatcagaagttccaggtcatcctcacacacatgggaagcaccaggccatcctgagacacatgagattctttctcacaaacaataagtaaagttcaaatcaccttaggcagcttcataaactttactaagaatggagactcactgtgaggttactagaagtcaaatatatcaaacacagggtggtccctggcacacagtgcttaatgaagttggtttatagttgtcagaagtgccctacacatgagcaggtaaagttctggctagtactggagctttgtagagaattttctgtgctgcacttatttgaaagtgattgtacaagttgggcccaggcgctaagttctcctttctttcctctatgtcccttttgtgtgccatattagatagtagggactgaacgtgacccttgagactttgagggctgatacatgaagacctccagggaccaaagaggtcaccaaatgttcatctgtttcctgccctcccatcactacctcttcttcttttgcctttcctaacttcctttgctcctctgttgtgatcctcagcaatggaatgcccaaagaatagctatgtcttcctctgtacaccatagcctttggttctgcccgaggcctatccactgtcctagccagactgtagccttttctctcttcctgggaagcatacatattgctctcagttcattacttagtgggacatctgtcttcacttgtgacttgagaaagaggtttgcatgtccctagttaacatgtcagttgaacacaggatgcaaattagttgttgcataatagcctctgcatctggaattcattatagctctaaatccattttataaatgtgttgtttaactctaaaccaggagcaaaagcctggggttgctcggtgagaaaccctttcatccagtgattgaaaactctggcactgccaaatttcttctgctttgcaaaaatttgctacagcttctctttcccctaaaacaggtgtcagagggaggcttcttgtgtgtgtttacaatcattatagtgtattaaacagtcacgtcgtgttccagaatgaaataaaaaatgttgcctaacccccacctgcagggcaattaaattattgtctggcatgtttatagcccctggaccagtcagtaatcagcttttagcttgaatagcagtcatggtgttacaatccagctctttgctgagcggttcggacttagcatttgcatttgataatttaatttaaataatacagagagaagtttaacacagttacacttcctgggaagtgttggaataaaagaactgaatgagttgtaccgtctgctttgtttgtttgtaaataacttcgtattcctgaatggtttctacttcccagttattaacctctgctgcttgtattgaataaactagaaattggtagtagcctcaaaagccacaagctctctgttctttcctccctcccagggaaacaatatctgagcaatctttaaattttcatgatgttgtggaagtccttcactgaaccattaaaaatatctccccatagagagcggtgcatgtgtgtgcatgcaagatacctttatatattagaggcccattttctcataagagcctctgttctgaagaatatttggtacctttagtaaaaatattgctacaggaacagtggacccccaagttaatgtgcaatctttttacagactaagataagtgaaattgaaacaaaaaggcacttgtagacatgtctgtccaagagaccgttcactgggtctccccaaggtttcctttataggaacccaccctatagggcctctgcacataatatagtgactcctaggtaaagtattccagctcaactaaacctgttgtgaaagccccttttctctccattttactctcgctggagagagaacatcctgcatgtccagctccctgagatgccagaaaaacctaaaccttaaaagggaaagtagctctgtggcacatgcaggaggagttctgagtttgaggccagccgggtctacaaagtgagttccaggacagccagggctatacagagaaaccctgtctcgaaaaaaaaaaaaaaaaaaagaaagaaaggaaggaaggaaggaaggaaggaaggaaggaaggaaggaaggaaggaagggaggaagaaagaaaggaagaaagaaagaaagaaggaaaagaaaagtagctctgtccattctgtgatttttctttcttgttattcttctttgttttatgtggcattttaaactttcccagtgtgacctacatgggctttcccttgattagaaatgagtagggtctggttaggttcttcactgtacccctggtttacaggacctgcttttgctaaccaacatggttgctggatgcaaattggtctgtgggtgttttcaaagaagttaattatatgagaaaatgatatttcctgacagtctctttgtaaaaatattgaagggaggccatttgtacctactgcttctaaggctgctggagatagcgcaggcagcatgtatgtcttcctgccagtggcaggcagaatgatggctgctgcagaaacctgctttcctttcgctggcccatctttaccttttcttctttgattttttcttcctttcatagatgtctttaattggtaaattgttcttatctaaacattgatttaccatcctctccatttatataatatataataggattataacgtttgtcactttttggtttttgtttttataacttccctgctatttccctatctatgtgaggtatagtgcgatgtttggctgtgtgtattcattatggaatgatgaagtcatctcaattaacctactcatcacctcatattttatatggtcagaacctataagatctactctgagcaatatctgaatatgtagcacattacacactattagtgacttcagggtcaataatttacactggatctctaaaacttagtccctctaacagactttgtatcctctgtgtccttcacatgccccaggtcttgataacaactcacaagaacttctgagagtgcacagggcagggaacacatcatactggcctttatttttgttcttgtgctcagtgtgtcctgggaaataaggcctgagactagtggaatacccactgagagaccttttgttcctctaaagaacagctgcatgctctgccagccgtgctgctggaggctgttttctactgggatctcttttctccaagtcagctcagatgcttcttgttctgatactgaaactgcaaagcccaaccaaccccattgttgaagaaactccattttgtgtgaaaccaggggctaaactccaattccaggaagtaaaccacaaagtccacctaagcaaacattccgtgacaacccactccccttagcaatagctagtgaggttacaatagcagggtcaaggtacacagacagataaagaagacaccgtgtagagaatagatagcttggccattctgtttgtttttcctcagtgtttggtttctacagattatgccagaaatgcagtttttaaaatattaacttgctgacccagatagaaattcctcaagcttgctgtaactacaaaaagtaccctgcacccctaaactcagggctctcactctgacccactgtgaggggggacagtaagagaccttgttcaggagctcatgataaagacctttgtgttttcattggaattggattctcagtggtctttggggtccctgtgacttgagcataacaaaaccacagggaagagaactaagctagcagtggtcatcctgcttatagccaagtcacacattttgtcagcagatccgctgtcatttgtgcctgtgactttggcatttggttattgtggtcccccccccccccttgatccttctagtaatggcgctgctgtgcataaggggcttatgctttttgtacagctcacagaatcaaaggattttcatagtgtgaagtcagatttgtgagtcaggttgttgtggtttataaaaaataaagagaaggaggggtatgtttggtgcaggcaaggtatggtgtgggggaaaggagtgcctctgtgggcccattctgacacattccttctccctgagggaccagccacgaagatggtatagtatagaatagagtttagcatagaatagagtttattcaggcatggggagaggagttgagggaggagagacagagaaagggagagaaagggagagggagggaggnnnnnnnnnnnnnnnnnnnngagggagggagggagagagagaaagagagagagagagagagagagagaagaggaatagaagcaagccatgtgcaagtggagagagaggggagggggattgggagagagggagagcaggggcaagaggccagggcaagagagagaggagggggcaagcagccccttctatagtgagtgagtcaggtacacctggctgttgccaggtaactgtggggcagagcctagactaactgtcaacacagggactttctctgctgctgctatccagcccttctggtcagaactgactgaaatcatggtgcagtactatactgcatccactctagtctctgctttgaattacttgctgttgaaagagcagtggtgaacattcccaggagtacaaatacaatccattccatgttgcacggcttcctgagctccaccagagagaggcacttatgaggattttaatggttatctgtgggaagagaggggaggacttttatgattatccatgggaagagaggggagtgtctctgagaagtagagccatagtggtcaaagaggagtcacaaacagaaatttccagctctaggggacaatgagcagtgatccagcgagattaacacactgttcttatagtagtatacattcaggatcttcacaggaacaggactcatgaaatccagtaatcatgggtgggtccttcattagagcaaatgtaatgattttcatctgttaaaattctatgattagttctgttaataaaaatgtctatttaagctatttaagacacccactaaagttctataatattaatttcacagaaaaattccaacagaactatattagttttccctcattaaggtaacattatggacttttaatggtactctcagttataatggtttttattgacctaattattaaatgaattaaaatctgtctcaatgccttaaaaattatgtaatagcagcatcaattcaaaagctggttattatggggttagaaaggagagattctctaaaccacatatccctaagacatattgttttatccaagatcaaaaagaaattgtgttttaatatgtttgaggaatttaccttcaaaaatttgtaaaattctaatagttaaataatattttacggtgatctgtgttgcacatgggaaatttatcttttctaagtttttaaacttttgatgacttccaaaggcagtactagagtggtgatatcagatacatgactgaatctatgtaggttttatagctcttggtatggaaatgtgagggccaactcaaaggaggaaggaaaagcaccaaaccccacgtgcctaaggccccacagcctagagcagtaggtctcagccttcctatcatgacgttaccacatttcctcatgttgtgctgacccccaactgtaaaattatttcatttctactttataattctaattttgctacttttatgaattgtaatataaattcttttggagacagacatttgagacccacaggttgtgaacctctgatgtaaaggtaaaggaaggttaggacacatcgattttacttcctggtcagagtgggcgtttctttggcacagatattaaatatagggcaccagtgtctctaaactccttacccagccctgactcagacattactaagagactgcttcatccttcctcagtaggacaatacagtctccgactgatcttgggactgtgtttcaggcacactcaccgagttggtgcatattgaaacctattttgcattcctggtgatcatccacaaatgcgacttgtcttttatacatacatgaatctcattttctccgcacagaaggtctctgagaggatgggctaatcagctttctgttactgtcacaactgcctgggttaaatcaacttctatagaataaatgctttattgtgtgagggagcagtatgtagaacagaaagacatgaaatactggaagtatggagaggaaaggagtgcagaagagatgaaaactgttcacaagaagggcagataaagcagctctgattgctgtgagtttagcaattaaggagaagcctcattctttgtagttggaaaaataggaaatgtgccttgaaaataagaccctagcccctaaaggtaaatgcaaattcattgagaagggacgagctggaacagagactgcaactgcacctgaaggagatccctgatggaaaacaatctcttaaagaagtattttcagaggtaccaaggttgtacagaaggcccaatgctggggtagatagaatggaacagatttcatactgagctggaagaaaccttagcaacattgcccacatggagctagttttgtagacatgaaaaatgcaaattataggaccatagaggctagcactcaggtgccagaaatctgttaaggctagtaacatgtatgcctccaccccgaccccccaaattagaatgagaatgcttactctatctcattcatagtggaagtgtgtaacccttgaacataaattataggacctcacagttaagataagctcttggctcttagaaaagactaggttttgaacttttgaatggtaccaagaccattatgattaacaggggtttttgagataaactaaatgcagatggaattgtgaaataaaaatgagactttagcatccaggcaagggtagacttgagattgttaatctcaattatcagtttgataagatttagaaccacatagttgccaaacgatgagcatgtctgtgagaggatttccagaaagatgcaacaaaggcaaaaccactatcctagatatggttaggaccactctgttggctgaggtcctagccagaataaagagtaggaagcaagctaacactagcatccatcccttattgcttccagactaggcaggccatgtaataactgccatcagtccctgctgccaaaccttctgcaccgtagccatgaagaactgtgactcaaaatgaagctccccccttaagttgccttggtgaatccacttcttgttctatgtggtacagtttaaaaaaaaatacaaaaaattgctctcatcagttattttaccatagcaacaaattagacaggtaggtatcactggaagttttggagacaccccacacacacaccagagacactctatgtcactagggaaattgctgtttctttggggattattaatcttgttaagaaaggaacttaaaattgactggagaaggattttcagagtttaaaggagaatatactcaagacaagcgagctgtctccatggttgtcttcctggaaaagggagatggagaagtcagagaaacctgtgtggtgcatgtttctgtggcacaaggcagaagggagctgggcagcttcatagaaaaggcatgaagtcgcctagagtatctgtaacagtatgatcctttagcactgtattcaaaagaaagagttcaatgtaggaagtggaaaagttatgctttttgaggatgacattctgagaaggaagtatattatctcatttaaaggatacttatttcttccatctccttatcatagcttaaatggatcaccttttctggaggtgtgttatttaccagatgactgacaggtccagccatattaactgagtagcttggagtattatctctatccaaggcaagaggtcaactctattcttttgaattggaaaaaatagctttcccttaatggggcctcaacagagccccaatcaaggctactctatcaatctcctctgtgaagatataaccccattgtaccttaggagatgtgctgaaattggagacgaggtataatctattcctcctgtgagattcccaagacctagtttctaagctgctttaccaaaataagatagtgcctggtgttcctcactggcaaaccaaggacattcctctcactgccccatccaacacctatcctcaccataaatgctattgtcttttcatttgacacataaggaagctggaccagggatctagtatttacctaagatcatatagccagcaaaggtgaggttgaagagtttaacttcagtgtctatatcttgtatttaaaaaggtatctcctacatgccatcaagaggaaaaagatttaagaagctttgtctcaaaatgaggcctgggttggaaccctctctactatcttcagccattaatttgaagtttggaatgtaccactccaaaggatttagttaaactcagtaagatattgtaaatatactgtgataaaagagtgcctgtcccatggagcaagattctataaaccatgccatcttaggctgccatgccctggtaggattacagaagatgacagtagctgtctctgaggactacagtggggattgtaggaaggcctgcatttagaggacccacaaaaggccacctggagagcctcctatatggtggctgttctggttgatctaagagtaaatctcatctttagtttgtggcatccgtactaaactcagagcagcaactaggacaacctagtcatatcgccactctgatagtcacctctgcaacaagagtgggtaccagaattggtggcatgggtggctctgaaaggcatttgtgctaatattcacagactgagacatttttaatttagtcagatgccatttctggaggagcaatttgtaccattaggggaaaattccacacaaaacatttggtgggaagtttgatgtctattatttggtttcagtcaaattttgacaacaatatgttccagagaattgcagatgttctcaaatcacatcttatttctgtaaaatccatgtgtgatatttattgaatagagcatctgccatagcaatgaaagcatgggtcttttagatggttaaaaatccccaatctctagttggtggagacatactgcctgtgtaccagcgaggctagcatgtgtcaaactgtgcccacggaaggcacccacagcattcctattcatgtagcctatgccacgttggaggacagaactgtagcatgggcactggttgggacagtgcaggctgaacttgagggaagagaaagtgactatcttttcttgcccaggatctcaagcatcaagcccttctccctccgcagcaaaccctccttaataagcaaagaagatgggcatgatctcatcttctatgcaaggcaacaaaacaagctcttcatgctgcaggtttaacaagacttgaatatattctgtcatttatggcctggtttcctaatttaaccacggacagtcaaaatctttgtttctcgaaatttctttctggagatagaaagaatgtgtgttttctttggattctgtgctattcagggtagaattgagaactggtgcgtgctaggcagtttctctaccatttagccgcacctttggtctgaaattgtcattggattttacaaggactcggctattaagagaaggaggatggggataagaatcatatcagaaggtagcagttcttggcaactgccatgtaacttcaaacaaggcttgtcattctaggtaaaaaagctgccctccagaactaacaccaggttcacctggactctgtccctccctggggctgctgcctgtcctctgccacctttcctgccttgctctagtactttctccagaaatcctaactgcctttcagtgacttccttcagtatgggttcttacttgagtccccaagcaaacctgaaattaggtggaaaagcttgagtacaggtgatttttaagggagtcagaggagatatttattgatttttattactggatgaatattgaacagctgttttctgccagacactgagctaaaccagggactgagaagaaatggcaatctcaggcagcaagcctctatttacatgggaagtggtaagaggtgagtatataggtgcccgtggtataggccatatacaagatattttaggagattgagacagactaaactccagaaaagggtaagagcctcaaccaaagaaactggaatgtgccatacagtaggtaaacatggaggaccagtgagcagacactggagacctagttcgtaccgactgaggcacttggcaatacagagcttggtttgaagatgagaaatgattagatctacagtcactatcatgaaagctgaagtatattgagctcttaatagttgacacatttccataagcacaggagagcaacagtttcctttaatgttctccaaatcaactcagtgagttatgatggttcaattttatgcataggagcacagcagctcaaacacactcctcctaccaaagaagtagcaattgtgggatttagactgaacactggtctattgtgaagctgagcaccaggggacattttcaagacttttgcatcatagcctgggtgtacccagtaccctcacttcctaaatagcttggaaagtcatatttccttgaactgccaaactttagattaaaatcccaaagttggctccatcttgtcctctccacgctggagaacattctcttctaggcaggctatgagagcccctcaattaccagttcacactggtttaatgtacctgttctgcagccaaaaaccattcattgagttcaaaggagaataaagctctaaggggcttattaataattgaacatttccaaagcatgtgggattgttaattccatttgccacagaaatcctgtcatgatgattaagacttagtcactataggaacgctgaaaagggaaatccattttctggctgcacaactcccactgtcttaatgctactgaaagagtctctttcaggtgtctgaatgtggttgtcttctagcagggcctgaactgctacctctgagtgcatggcttcttacgtctttgagtatttgctacaaaaggtgcttcacccttagataccctctgctggtagtatgaggaacctcttcacacacacctggcatcatgaatgcccttgccttgaaagtgtgctgcttttcagtcaactagcttttactgaagtcaaggtccatgctgtcaagtagcccatgctcagtagaccgtgacacagaaaactcaaagcttcttttgtaagtgacagtaaccaacttacagtggcccagcaaaaagataggacttgaattgctcatataatctcaagctctcatggagatgattcaggcctgcccaaatctacggccatttgtggtgttttgaatatgcttgcctcatagtgagtggcactgttaggaggtgtggccttgttggaatgtgtcactgtgagagtgggctttagaagtttcccccctatgcttaggctctacccattgccaaagagagcttttccctagctccctgcagatgctggtcttcctggctgccttcagatcaagatgcagaactctcagttccttctccagcacaatgtctgcctgcgtgctgccatgtttcctgttgctgctgataatagactaaacttctgaaactgtaagccagccccaactaaatgtttgcctttatgagcgttgccttggccatggtgtctcttcatagcaatggaaactctaagatagctatgaggtattctgcctttctcacaagcaacgtcccttcaaggaaggaagtgagagcaacctgaagctcacaccctactagcttatagtgagaacactttcttcagtgatgcttaagtgataattgttaaatacatgctgagactcctctgatatagcctgagttgcatgcccaccactgcttcgataacatggccaacgaatagatatcccatgaggccagaccttaagttcttactaaggtcagatagaaatgaaaccaattgcacccaaaatccaaggtataggtcattttctccaggaagtggagactatgtagcccagagagctagggtgaaatcaaacataatgaataaataaataaataaataaataaataacaaaatccccaaaagaatgagatgattcctagtgatattccattctcctcatagattggtgccttggctgttgtcaccagagaggcttcctccagcagcagatgggggcaggtgcagagacccagactcagtcactatgtagagaaagagtttaatttggaggtcttcattggttttctccctttgagagaaagaggggaaggaagactgtagcagtcagaggggatggaggacaacaggagaacatggcctactgaatcaatacattaaaagaaaacaaaggaatttaatataatataatttgatgtatattgaaagaaatagtgaatattgaaaataatacagtttatacagtgtacactttctctcatttacatctatgtgtttagttttatacactcttttggtaaaatattatgcttataatttggaatattaacctaagaagggacaccttgtttttatggaagtgagaaagaaaaaattgctttagattaaaataactcttcataggggaaaaaaaatcgaccacaaccaccaaaacaaaacaaaacaaaaccacccacaaaacaccaatggagccacaaaatgaaggaaagaactcagaaatctctcaagggacagacttttgcacttagtcatgaagaataaatagaaactcaggagtagtacaggagggtaactgggcatcaagccctctctgccaatgcctcaaataggaatgaccctggaaaatggtttttcacttaaaaagatttgcctagctctcaaccatgtagccgtgctgggataggacagcaggaagcagcaggcactcagttgctttgcactgatattaacttatagaggagagacaaatactaaacaaataaggctgagaagatggctcagtaggtaagcacttgacactcaggcatgatatgtttccaaccatagtagaaagagtaaatcaactcctcaaatgggcttccacatatatgcccacataaaaataattacattagaattgaattttacattgttgtccaaatgataaagtagttatcattttaatgagtgtttaaggttgtagtcaactttagttccttgagctgtgatttgcccatctttaaagttgctgttttctagtactataaccaatcaacaatacaataatatagtaaagaaggcagacagattcattgatatacatctccacacaggtgcatgcacacgtagacacacagacacacacacagacacacacacagacacacacacagacacacacacacacacacacacacacacacacacatacacagtggacacctttaagaaagactgcaaaaggtcagtggactccttgtagttagataggtggctactttcctgctctgcctgcatatgtctctgctggtgaattcatcgtcgttgtcgtcgttgtcatccttgtcttcctcatctttgtcctcctccgtgctctgtacttggtgctttcttttcgatgctcagtgtcttcatcccctgtgtctatctcagtactgagtaatggtgtctacttttatactggattctcctatgaagcattcgaggttcaaaatgcttttccgaatggaaacaaggaaagtttggagatgctgtttttatgctagtgactattactgtatggcaaagttgattattctattttgtaactaatctggccattggacattaccacaatagaatccatcttcataagcggtttgaaggaagagagacttttctcatttgcatatcctgagagtcgcaatggaaacttgtcacgacagtccatctgcacaaggcaccaccgtgacatagaggtgtgtgtggcagaaagacactaagaagacggagaactgccttatgtctgggtaggttctcctttacagaatctcttcaattacttattaaatgaaagccagatgcttatacttagcatctttaatgtttccacattcccaggtatcccataaaatagcactactaaatcaaaggccctgtcgtagactctgaaagaatgtatggtattgcagagatattaatgaattcagggttttaaaagtcacattcataattttttcaaggtctatactccttctcctccatgtacatgcacactccctgcccccaaaataaaaaagagtggagagggaagtcacagataaatgtctctgtgtcacaggctggcaatgcatcttccaccagacaaaatgagttactgggagaaaattttcgatgtgatttagaagatacgatttaaattctattagaatttcttgagataaaaggcagtgagttaagtgagaggatgtaagccttcctgtgatatctgattgttaatgagcagaaagtattaatcttagcaaccaagaagagaaaaatgcctagtgtttttcattaaatcaactaaatgattaaatgagttagtcactggaaaccattttaattttctgaatgtgaaatgtgcagcttacagtgaataaattcaaagcacctttctaagcaagttttgaccataaaaatgcgggttataaagatgtttggtattttcttctttataggtagtcagtattttaaatgcggtgacattgattgtgtggaaggcaatgcccctactttctgggcttaaaggagttggcatccagagcaccatccctaatggatcttcaacactattacaaaatgattgattattgttgtagtcattttagcagctttcagagctgttatatttttaattaaattggctgtgaattttgtaagtggcaaaggttgataaactagcgcttggtgctgtattaccattctttgcgtggctgtcatagttggtacatttatgtgcataatcttcttaacattcataagtctctctggtcctgggcattgatctgcgagattacttgctatttggaaatggagaaaacataaaaccacactcaggaaagcacgtggctctgagacacattgcttggtgggctgagaggagttgccacacggagctccatagagattagcttaccattccccttcacctcaggaaggaaaagtagacatgtcacgtttcctgatagggttggagagattctgctgagtcagaccatgcactgagtgggtgctccttatacaggaatgaacgaatataatgaaaggaccagacactgtatcaaccaaataagaaagggtcatttggaaaaccgctgtgcaggaaagagccgtctagaatgaaacagactctgaaatccaagggttgggcaaatcttcgcaatcagtcatcactggagctggatacaaagttggaaaaacaggacataagggcgtgtcctgtgaaccatttgagttagggagccaggttgaatgcagctcagaatgaaaggtgactgatctgaagttgggacagctgttggaacgggtccacctaggcaagatcataacatgctctgggagggcagctcgacctcccatgacttgcatttgctaagaagagaaatccaaagcccaggagaactggtaggagaggggggaagatgtgttcaatagaatgatagcacatttcactatttatattttatgtttagcaggagggctgacaaaccatgtctcttggtactaacaatttgcagattagggaggaagctaagctccagaagggcaatgacacaggctgaatgtcagtcaatatctagacaacttgtcctaaaaccagtgctcttcctaaaacagtatcacttctgactttagctatagaagtcagaggacagacccaatttctctctttatctaacagtgactatggatggtatctaacaaccatggtgagccagcagatcataatagggctcaagagccacagaggctgagattggaattccaattgaacagactgattttggcaagacaaatgctctcctcctcttcagtgtctacatttgtccagtggagtggtgggagagcctgcattactaggctgtaagaattgcatgattcttcataccaagtacttacttgattgaaagcatgcagcaactagctgatctatggtgactgttactatcaccttagagtaacagaattagtcagtatatcagtaaagtatcttgtaccctttgtagaaaaagaaaataaatatttcacatttcataaagacacagatgctattgaaatgtactatccagctcaccagtggagttttggtgtacaagaaaaatttcacatttaggccacagcttgactctttgttactaacagcttcttactggctcatgaatcctattacgtataggtctaggtaaaagcacgcccccaccccatgcatgcacacactcaagcacacacatatacacattcacccctaaaactaaaaaacagtactactagttcgtatttgactttcattgtcataagaaggattcaagcattaggtggtggaaatataggtcaatctgcaaaatatttgatgtgggctaatctatgtctttaatacccaaactagagaggtagaagcaggcaaatccctgagttcaaggccagcctcgtgtatatggtaaggcagattccaggctacctagggcaacatagtcatattttatctcaacaataagcaaagaataacatcaacaataatatacacgtatataagtggttctaatgagtgggttcagtgtgcaagaagagcccataatgtttttgcaaaggaccagagtttggtttcctgcacccatgctggacagctcacaactgcctgcaacctcagctccaagggacctggcatcctttttctggtctccacaggcaagccatccatgtggaatccactcgcacagacatgtatgaataaaactgatgtgagtaatctttaaagaaagggtgggactggcctgaaaggcagcatatctcactcaaagtcatcatctgggagggttgacttttctagtcatattggccacatcctgatacttcctattgactagatcattaagaaggcactgggatagactgaagtccactcagatgtgtaccacattgtttgtaaggtagataaagtagtgttcatgtccagcaatgcaaatatgacccctccaccctgaggccactcaggaagcgtttggatttggcacctggatttcttcaaataaaatttcacaatggcgttcacagcaacagctaacatcacggggagccaggaagaaagatgtgtacacagggagcggggtggggatggggactacattagaaagaacagagtaaacatggcagttacttttagtggtgtaattcccatagtttccaaccagaggctacagaaattgcaaaggagggaaaagactttcccagtattcctgcactggggttacagatgagacgcagagctatcattcgtgtttgcaggcgatctcaatcattctgcacgtgtgcccaccctggcaccatttcaaagcagtatttcacatcaccctagtattttatcacacaccgcatgcctgacacagctctctctggcatgagagtgcttcgggctaactttcagattttgtcagtaagaacaaaggaacttgctgccacccagaagtggctggggaaacattcctccaagtgctaccaatttgtcaaggtaaagcaccacgtgggaagaaaggagggacaagtgagcccacatcttgccagtttctgttcattcttagcagtgttctctgcctgggctcagggccaggaggagacagtcacaacgctttcatgagccaatggcagtcaatccctggtacatgaagagaagaaagggaagctttttcccaaacaattcatatcaccaacttcagtttctgtcacctagggaagcaatctaggtatatcattctgtctttgtcttttggtgtggtccagacccagctataagcataatactctctttttcatgcacacaaacaacctggagccttgtcatgccatggaatgtaacagaccctggaaatgacatgacagacatgactgcagagctcgggtaccatgacagaaactgtcagagttttaggtgcaagaaggtgggcatcactggggcactgactgattttaatagggtgttacctatatcaaactccagcagtactctctgagactacaagaaacaatttgatgtctattacatcatcaggctccacctccttagcgtgtccaagtgatagataaaccgggatatggtacaagctcaactactcagtacttagatagctttcactaatcatgtttctcagcttgccatgtgtggaaattacttctaatgctatttgtgttttgtcaatcaacttaaaaaactgtgaggggcttgggctatagctaggttgagagaatgcttacccaacatccaggaactcttggttcagtttccagcaccacctaaaactaggccttgacatccataccatacctgttatccaggtcattgggagggagagccaagaggatcattcagagtcagacctcctacataggcagagtttgaaatcagccagggctacctaagtccttgtctcaacaaacagaccgataaacaaacaacaacaaaatcaaacaaaagacataaagcacactaatatcaagtggccagtgtcatttaaaatcaaaaaacataaaacacagtaataaatactaaacaaccaagtgaccagtgtcacttaaaaataaataaagtgccactaactctcagctgggtttttgggatctattattggggactgagatttggctgatggtttttggatcaggacatggggaacagaaaagctggagatattactgagtgtcccagtgcttccctggcctgtggattgccccaagttcagtctctaggactggaaagagaagaaaagtgcaaaaggggatcaaaaccctcagagtgcaatgtagaagacaagggagaatcagaagtaatcatcctcccgagacagcacctccaatgggacagggatatctcttcacacacacacacacacacacacgcacacacacacacacacacacacacacacacacacacacacaccacacaaagagggactaagatgcactcattgagttggaccacaaacacttgaagaaggaagtaacaaaggtggtgaatggctccatggaccctgtggaggaactttgttctagaaggatggatagacagggaagcactggtactaggctagtataggtggattactgtttcagaaacaggaattgcttacagaggaaggagtaaagagcccaaagcagaggagaagggagctgggctggcagcaaggttcctgagaatccagagaaaagatgatggcaatgatgatgctggcagagctggagcagtggctagaagaggaaacaatggcctaggagacctgttgactgagtaagagatcagcacatacaggcactatgtattcctacccactccatgctgtgtttcccagcctgtttccagaacagcatccaggtccctctgaatatggatctatactcctttatctaagaatcctgaagccttgcatctgccttagctaaaaatgacacatagtttacccagtgtaagtctgtcagctcagttgttactattctcatgttccatgttgaggtccatggttcattcagattactgtgcaagctagatctgcaaataagaactgagacctgagaataacatggtctgtgaacacagtttacaaggccagggtggactctgctgttcccattattttctgcttgcctttatagctttagttttaatgcagaacaattttgtctctcagtgaaaacatttcggtatcttcggttgtttgaggatgtcatggtagaaggggaaactgtgtgcttgtcacatctagtgagtagagactcagcatcctacaaatcattatccatactcaaaataatcttacacacctaagaaagtcctgacccagaacaggagagcctgaaggtaagacctgtcacttgagagtgtcagacctgggaagggttgtgtgctgctatcatgtaccactgtttgttgctcaggatcaactgtgtgtcttcatatgtgtgtgggggaagggaagcaactgcaagacagattggcaggaagaagcccaggctttacagttattctgagatcccatgtttgactgagaaatcacacatggtgacacatatatattacttaagcacttcaaaagctgaaacaggaggatcaatagtttgagatcatcttgggctaactagtaagatcttgtcttagaaagaaacaagcaaaagcaccaccaccaccaccaccaccaccaccaccaccaccaccaccaccaagtcagctaatcagatgaggcagctggagactagtccatgaccctagatatctacaacagactgtcgaatatttttatagattcaagtggctttgagatgtctctttacaggcagatctaccaataaccaaaggtcacttagcctgtggtattctagcaggtatatgtaaaaatcaaataatcttcataattccttggttagcttttaggcctgcctggaaagcaaacatctcccatttcaaaagattgcagcaattgctacttttccttgtggggaaagacctcacaaagataaacatgttttaaattgctgcatgcctcctgcaagcttggagtctgtttgtgagacatttatctacttatgcactcacccccaattatcacttaattaataaacttaataacatgaggtatgctgatcaataaaaagagaagggatggagctgagcctgaagtattatagtattgacccactgtagagtgctaagagtcgtttctctaaaatgagcatgcttccgtccactgaagttccaagagagggaccagatgtccttcagtgtttagacagccagactgataccttagtcttatacttagactgatactcttctgagccaagagggaagggactccaggtccctatttaaaggacacagcatttgtggacagaaatgattttccttgtaaactgggaccactgtgttcactagtgtgggcatgggcaactgtctttgtggtatgaataccacccagcagctaacagcatagtcagaatccagggagatcaccctgcccggttaaatgcatattgagacatttttcatgtacttctttgagatgccgaagacaagctcagggatgcaaggtaccttcaagtaccttcgcttcaaggtgcttcacttccactgctctcacacctttcctctccaaatgtcaagaaggctagagacgcgagacagatacacatctacagcaaaagtgctgagagcacagagatcctacttattcctagtatcgaggtcacagtgatggccttagacatagctatcaccattttagagataagcagtggcttataatggtctgcatcctgtgggttgcatctttcttctgggactgagatatgaatactgagaacatcctcatttgggtacaatatgtgcggtaagcactgagaaggtcttcactgggctcagtatatgagaagcaggagaagatgctcatttgtgttcactatataagggagcactgagaagatccctacgtaggcccaatagccagcaaatacacccaagctgacttcagtgatcaatgttgcacaatgaaaatatcactaaaattcattagtgggataaaatctgtaactttttccatccatgagaccactgggaatccttccgcagtgaacttgtgggccagggattagcctttccctgaattatagtgaaatctgacttaagtaatcaccttgggaccatccaaaatcggtaacttggtagaggttgaactttagctaaaggtcaagcaaaattcttctagaaaccttaggggttgcttaaaggtgaactaaaaagcttagaggagaattggcttaattcctggtttatgaaccaagtagcatggccaagtagtctgcggaacgcagtcagcttagcaaagcgccttgactcgtccatctgaaaggcatcatccccccgctcaggtgctcaagcttttctgacctagtagacacacgctccacgatgcttgatttgccaaggaaacccatcccttagcccatgtgctcaggaccactggcaggaggcagaaatacagtgacattccaggttaggccttgctcatattccaaaaaaacgtgattcaccactgcctttgagagcctaccttcaaatactagcatctgctcactatagaaaggactttctttgagggagggaccctgcagctgaagatatagctcagtgattaagagcatgtacttctcttccaaaggacttccaggtaggtttctagcacccatgtttggtgactcactccgttctataattccaacttcatgagatctgatgtcctcttctggcctccgcaggtacatgcatacatgtgacatataacgatacagatgtacatataaataaaaataatataattttaagggaaagatatttattttagtccacaattcagatttattgttatattacatctcaaaaggcctagcaggaagagttagtcaagtgtacaatctattttctcatcctctctgaaacacacagagacattagaacatcttgagctaacactctgtgtcttacattggactactataacagaacatcatagaatagctactttcccatagtgctggaagctatagtccaagaataggcttcctggtgactcgggactaagtgagagccttccgcgttcctgcttatgtcttccaccaatgaatcctcatatgccagagaagaaaagttcagatgtcttcaactactggaaagaacactcatgctgtcatagagctcccatggtaagctaagctcctaaagatccagcaacaagtcctatactatggtcaaggttttatcacatggacactgatgaacacatagacagtagatatctaaaattaatttctagggccaaactaagaaggccgagatggcagttgtaatctctttgctatcttcctgtatgcagagaaggatccaagcctactggatgaacatctatctcaactgtgacatgtttgacatgtttttgtagcttagactattcacaacaacctacttagagtttctttctccacctctcagaaaaaccaccccccccccccaaaaagccagtcacactgttcactggatcctgtgtcaatcaccatgctagacaagcctgctacttgcagtgtgtcctagtgaatttttacatagcatttcatttcagtcatagtactgttcttcatttggggagttaagtgtccatgagttaaaaatactgatttcttttccagggatagtgaacagatgtaatgacagggcacaggacagctttgaagacaaggacacatatagcagtggccttcttcctgggaagagtaaactgaccttgatagaactgctgccaagccgccagtagacaggcgatgcttgtggctttcaggtgtccccaagatttcttctgctcctcctaccacagagatgttggctacttatatgtccctgtggctgcacatgtcaggatccttcttctcacatgagatggaagttcccttaccaccatttagaccatgtttactgaatagtgctgagttctgggaacttagtgttactcggttttctgtttgccaagtatgcagtggcaagagctactggccacttaaggtcttgctgaaatgggggaggcagagggaggccctgggagaaatgctgacatgaggacttcttaatatggaaacaaggttaatccagtacagttggatctgcatgtttcagaccttttgttgctctgtattaatgagtaccacctatttggggagtctagcttagtttgtattcagaagaaattggtgttttgaatggatggtgtattcacaaaggcaagccatgcacaccctcaatgcctgcttcacataactaaagactcatttatgctaatgtcattgagctgacttagttcacaggataaaccatctcagcacaattgtctgattgaaggtgccttggaaagcaggcaaacaacaaaaaggcagctcacagagaaaaccctggcaaggtgcctatgttcgaaggtctcaagtcttgtggctgaagcttcctggaacccggttcttggtacctttctagaagatctttccatgctccctcaaagcctttactcttctcattccagtgactatttccaaagtgacaggccagctctggctggactggtacaccatgatagtctcttctgttctacacatgtgcatgtgcaggctaaggaaggagctaacaacaaaagtttcacggggctctgcacacctgggtgtggctgaagtcatgacgatggcaagctagctatcacttcctctggtcactgccgtctgctcaacagtattgtgctacagttgtagtaaagatctgagatctagtacgtatgttccatatttggaattaattttctctggttttgtatatccggcccaaagttactacctgttgtcttacaaaagcaaggtgatctgtaggaaagatgaaaacaaaggaccagttagagttagggatctgctcttccaggtagaagacttctagagcgagttcaagacatttaataaggctatcttttcttatgattcacataaaaatttacacctttgtgtagtaaggactgtctacacaggaagaccctggcagaaggccattcactaacaacttagatgccaggttgtacctgatcttatttggagatataagtcttattgaaatatagctaggcttacaaactattttcttaatacaatggataaatacttgtatccaagggcataagataatacctatctagccttttataggagaaaatagtgtttatcagtgtcctttactaaagtgggaagaaaaatgtaaatagcttgcaatgcctgttactgaacggctgaagtgaggcaggccagactcaagtgttccttgtggggcatagtaaatgagttgtctactatacatggaggaggcatgatgccataggccacggactaaacatgacagcaactcagtaggcaagacaagactagaaacctaaatttcagggctgtggaagcaacacttcaagctctggccttgagagggagcttctaggtgggaaaaggggtgaggagaatgtaagagagctgagaatcaagtatgggatgctctgtcacttcctggatgagtggaggaggagaaagcacacgaacatgctgctacaaaggcaaagggcctggagtagagcacacatcaagaactcagagaatgtggttagacttcagtgagttagggaaggattgaagcactatgtggtgagtttcagtttatcccatgtgtatagaagggcatggaatgaacccagaataggaactatatagtattagaaactgtattctgaagctggatgcctgagttcatctaaaaatttgctgattactagtcaggtaacccttgcaggttaaatgaagattaaaggtaataatgtttgcaatatgcttagaccactgctgagcacatagcacaccatatgtaaatgttggttttgattattcctaatggagagaaaagtcaaatgaactgatgtaaacttctctctgtctctatctctctgtccctgtctccttctctgtgtttgttgttttgtctctgtctctctatatctctgcctctgtctctctctgcctcttggtctctatctctgtctgtctgcctctgtctgcctctgtctgtctgtaggtctctctgtctctctgcctctctctttgtgtctctgtgtgtgtgtgtgtttgtgagagagagagagagagagagagagagagagagagagagagagagaggtatatttgaaggtcagaaaaacctcaacccgcacgtgccaccttgtttgatccagggtcttgtgttttgctattgcacaggctagttggtccatagacatcccgcttacctgtcttcgcctctatttcatggtaggaacactggaaatacagatgcaccattgctcctagctttttatagattctagggatccaaatctcggtccttatgctttcatgacgagtgttttacccattgaggtctccttagtcctgacttagacttttcaaatgatgatgctagagtattcaaaaagggaagcaaggaaaccatttagcagatagctcagattatctaggggagagataacttccctagataatctcatggggtcccaccatctttcttggtttttccttggtgtatatcactctaacattatgttctctgggacagaagatcccatcagctacagagaagtgaactgccacatatgcctacctctatcactacttctcttcctaacactgtatgcacagtcccctaagcaattattgatatgtagccctcaccagagtgaaaagaacaccaggggtcaatctcagcatgtggcaggaagaggcatgtgcaaagcctagcactttccatgggagatttacacgttatacatggtaacagaaaagccctgggactctgcctcaagaaagaatgccagccttcccatcagggtgcctcctcagcagaccggcaggattttcatgctcacttaagtcctgaggacatgggaaggcaattcaaattaatttttgaggtcacagcgccaaacttgggctgtgttagcccacggaaacattaacaggctaatgtattccatcatggagagagaatcaaagagactgtaatggggcttcattatatccatctgtccatccatcacttcttcccattgctcaccacttgacttgaaaaatgagacgccccccaactaattagatttaccctaatctcctttatggaccatcaatcctcttcagaggccatctgtgagtttagagttcagacctttaagaattatgctaatcagtctttctccaatttaacgtgttcatctgatgaccacaatttgaagcttctggctgtgacaaatgggaaaccattgtgagcttttgttctaattttaaacactgtcatcttcctgaagtgccacataagggataatttctaagaaagcagtcaagaatggaaggatctttaagccaggtaacatttaaaaagaaaaaaagaaggaaaaaaaaaagaagagataggaaaccagtgtgagtgtggggagaattttaattgctttgtaatattaggacatagttggctctcatttgtataatcaaattagaagtttccagaggtattaaattatgttatgatgtagaactgtaaatttcattgggtataagatacagtaaaaccagctcatgggggtggggaggcaccaagagggaagttattgatgagcagatattctgcattggcaggagcctatggcctgatccctagaggtgggtgaaatatgaggcaggtttccatatagggttgaatttggtaagaactcagcacatgatatttgctgtagactcttctcctggtggatggaaataaccagctacgcaatcagacacagggcacacagaaggggcagtgggacgtggtaaatgagtcagcagctaggtgttgcagtgttaccctggattagcactgcttaagcttaaacatgcctgggaacctcttggagatggtgttaagtaattgtctcaccccagtagatctggtgtagggctaggggcagcatttctaacaagctctcaggtgaggccatactgtaggtctatagacagaaaatgtcacgaacttggggactagactaaactgaagtcctctctctagtgttgtagcctctggaaaatgactttctgcttgttcattcttttaacaagtatttactgaatctcagcagtgggatagaatctatgcccaatttagtccctggaacaggaagagtgtcacagttctggggcttctggtctcctgcagtaagtcaggacgtaagaaaacagtgaaatgtgtatggatagctcttgtaactacacacttgccgtagcataagagtagccaatgaatagggagacgctcccatgtatatggcaattcttaaggaattccacaaggattacccctcacataacctttatcacactgtgtaagacaggtcctcttatcccatttttagatacaggcactgagacacagacaggtgagttgctttgtcatcctttaatacaggtaagtaaaggattacagatgtgattctaagacaaaaagtcccatctggacccaatgcttttgattgcaacaggccaaacggtaactgcttgagggtctgttcagtttctgtcacaatcactctgctgctgtggtacccacagacactggaaatgagtgctaccaagttccagtgaggactgggatttggatgccagaacccatataacaaaccaggcatgttccaacatgggcttataatgctatcactgtggaggatggaggcaggaggattattgaggattgctggatgccagactagctggaaacaaaaacaaaaaatgtgagctcagattcagcaagagatcttgactcaaataaataagatggagactgatggagaaagatagccaacatagtcctcaggcctacacccacatgtgtgtgcgcgcacacacacacacacacacacacacacacacacacacacacacacacacacacacacaggtccagagatatacatacacataaacacacacacacacacacacataaggccaggcaatattctatttcacaggactctcattagaatgatgtttatccttaaatatgctcagatgtagtttaccgtggataagatgcctcccttgatggggttatagttccctatgtttccatgtttgtgtaactttattcatttctttcttcttgttctgctgatttcactcctggaccaagggtttatttcttctcaataataatttcccttcagcatctacagtctatgtggagtagatctatttgttgtctccccccccccataccatgacatctgttttctgcccacttgttcatttttctactcattatattgttatttgtaatttcccccgatggctttcataattggcagataatatttggcctcttactctctttttagagatgggatgaaaacatgataacattgctactctcactctgagaaaaggtaaattcccttaagatgtaggaagcaggtgttcccagcagtcactcttgtttgaaatcaatggctctggatgcacacatgaaaagaggaaccacttccattttccttaaactgtgggacattagaaggaacatactattttatccacttctgagataggattttctcaggatcctgtatcaacaagaactgtggcagtgactataggcatgagctccagtgtcagtcctaactgtggactctggtcctgccacatgatagccttgtgaccttggacacatcctctggcttttctgtgccctggctgctatgaaatggggagaagagtaagacactgttgctataactaaccatacattggcactggctaagacacaaaataaatgtattgcctcccagctctagaagctagaagtctgtggtcaagatgtcagcgatgttagctcctcctgggctgggtgggaaaaatgagatctatgcccctcatctgccacacagtccattggcaacttgatatacctccattggtgaattcattgccctctactctgagttcccttcatatgatatcctctggtattcatggttgtctctgtccaatgttttctcttgtagaaggataccagtcatactgaattaaggctgatacctctaatataatgtggcttcctgtaaaatccttattttcagaggaagttataatctcaagtattgggaggctggatttcagcatgccttggacagacacaaatgaaccaaccctcaagcacatatggaccactgaggattgttaggatcattagatgagacaatctgagccttacataagtgtgaaaatttaacattcctctctcagagccagaaaactgacctttctcacaattcctgaagtttccctgtatttcttctgtttctccttttctctcatttttcatgaaacaaagggaaatagaaagggcagagaaaagatattatctcagtatagaaggctctgcattcaaccacgagaatacacaaagctattccagtctaattcatttgagaagctatttaaagtagccagatgattttacttgaccaattttaaaaccataatatttatccaatggactttttttttccttctaactttctaaccatgtttgagaaaccatgttattggaatcagataagctggctcaacatcttcagaatccgtgtgtactgctatggatctgaaacataattatcaagcttaagttaattagactaatgctcagaaagtctggcctggcagcttacactaagtaattatatatactaattaaaaatgggtctagggagatggcttagcaagtaaagtgtttgcatgcaaacaaaaggacctgagttcagatcctaagacccagcaaaaagttgagatcccgacataagtggctataaccctagggcagggcagagtgtgaaaacagtggtgatgactatcatctagtctagcctacaactccatgtttagaaaaaaatttaaaataggatgaggtcagaatgactgaggaagacatccttatcttaacattaacctttggctcctgttggtataaacatgagtgtgtgctcctaagtacagggtcacacatgcatggatgtaggatgtagcatacactcacacacacacacacacacacacacacacacacacacacacacacacacacaaacacacccttaaaaagtataattcacagagagtagaggcaaacaaagcactattcaacacaacctgtgcatatgtacatctaaggtgccatgtggtgtggaaggtacatacagtgagaagggacctgcaaatatcattccaagtcctctacaaagcgtgtcttctagttgcttgccctgttgctgtgatcagttatgtattgaaagcaatttaaggaagcaggggttgatttgggctcacaggtcaaggttgtagttaatcgtggtggggcagccatggtgtcaagagcatgaagcagcttgccacgttgggttgcatgtcaagaggtagaggtgtgaatgctgctcctcacctcaccttattcttcttattcagtctggaagcccatctcatggaatggtgttactcacgtttaagtggcacttcctacctcagttaattcagtctaggaacatcctcataggcatacccagaggtctgcatcacaagtgactctagggactgtcaagctgctcatcagtatcaaccataacaatcaggtacttatgcccgcttaatcagtggagggtgtgcaggtgtcactgcagggacatctcaagatggtgactagccatgggttctcactggctagtagaccatctgaagtacccaaaaccctgaaatgccaactcattgtcctttctcaatcttctcattcaaataatggttcccgtggaatagccagaggttagcttgcttgtcattttcaagctcttaaacagtgcaactgtcactatcagagtagacaatcaacccacatgtaagtgtaggtatatcttttctttgcctttctgttattttttttctccagctacctttaaagggagaagaatgtagctactatgattttagggacaaagatgggttaggaggggatattcaagagctggctgtctatccatatccttcataactttattgtttcatcaaactttgatgaataactctcattaaattttcaggttgatgagggctatgaagaaatcttatgtgttctgtatatctgttctagcatgtttctcttcttgccttagcattttgcagtttataaagcatgatcaactcattattggaggccaggggctggggagacatgtatcatcctcctgagtagtcttttgtgaccagttcattcagatagaaagcacttcacaggccctctgcatgtttgcttgtgattttgtaaggtcatcattattagggtattagatttgcagtcattgttaaaacatttgattgaactataatcactgatgttttgaaggtcaatgtaacatgggctgtcatggatagacatgattttgcccacatgcaaggtataatttagtgaggaagacaaatgcatatgattgtgcttgtactatatttcctgaagtctccaagatggacacctcatcctttggtagatctggggaataaatatgttatatgagtcagagaccagcatgtgcaatgggctggttgtgggcaaagcaggccttctagagggcaatgcatattcatatgggccaagagatgaggatagagtaaaaattaagggccattaataccaagaaggtaggccaaagagcaaagaatgagatatcaagaatgagaaaaccaattgaaactaccctggattatattagttggggttctctagagtcacagaacttatggatagtctccatatagtaaaggagtttattgatgacttacagtctgcagtccaattcccaacaatggttcagtaatagctgtgaatgaaagtccaaggatctagcagttactcagtcccacacggcaagcaggcaagggagctagagcgagactcccttcttccaatgtccttatattgtctccagcagaaggtatagcccagattaaaggtgtggtggaacacacctttaatcccagctgaccttgaactcggagatttaatcttctggaatccatacccactatgcctcaagatctccataccaagatccagatcagaaacttctatctccagcctccagatgagggtcactggtgagccttccaattctggattgtagttcattccaaatatagtcaagttgacaaccaggaatagccactacaatccactccttgtcaatttgacacaaataatatctcatgttcacatgaaataataaccataacccagttaattactcatgacccagtttctcccttcaaaatgggtaattctctcatgtgtgtttcttcataatttgtttgctgaagtttatttttctgagaaaaggtcttagtatgtatccctagttgtcttagatcttactgtataaactaggttgacattgaacttacagttgttacaatggcctttatcagagctctgtggaggtccattagagaaagctatttctctagcctgaatggagaacttccatcccaagttatattagacattaaaattaatccaattcatttagtcaaacacctaaaccatgcaccaccctctaggaaggtgggtttaccttaaaccctaaaagaaataggagcagccaggtgtggtggcacatgcctttaatcccagcactcaggaggcagaggcgggcagatttctgagttcgaggccagcctggtctacagagtgagttctaggatagccaggactacatagcgaaaccctgtcttgaccctcccccccaagaaaaaaaccaacccccccaaaaaaagaaaagaaaagaaataggagtgatgatgatccctttaatgagctatgtactttttcttcagcatctctgtcctgtatgcattccttccatggcctccaaaaccctgtcactcttccaggcttttcaagtcctgattcagaaagatgaagcatttcatttttctcctccgtagtctgtctttggatattggtcaaatatgttttttttttctttcttctggtgctttaggctttttatatttcctctaaagctcccctccttgccatgtggctgcatgtctgtcatgtggctggcatccaggatagcttaactcacatggcatgccttggatgcaccatcccctgaccttcacatacttcttttcattatttttgatttccaagttgaaagctagaagcaggatactcctattatatttaactgagggtctttttaaaacagaaaagcaatttagaacttcagacatgtgaatcaatttctgtagttgcttatatccccagaccttgttttgcctctctgtatggtgaggaaattgaataagatgctatatatctgtgattctcaacctgtggtctatgacccttttggggtcatatatcagatatcctgcagatcagacatttacatcgctatcctttaacagtagcaacattttacttatgaagaagcaatgaaataattttatggttgtgtggtcaccacaacatgaggaactttacgaaagggtcacagcgccaggaaggctgagaaccattactatatatgaaaatgcttcattgggcatagtcagatgttaaatgcatctgtgttattcatgtggttaaatgcatttgctgtatagttatgagggctggaggtcaaactttagcacccaacaacaaatatacctgtaatgccagataccagggatacagggataggaagttcactggggttctgcacctcctagcctagctgagaaaacatagatcccaggttcagagaaagaccttaccataaagaaataggtagagagtgatacaggatagtgcatggttactctttcctctagacattacatattgccatcttaggctttacctctggtagccatggcaacaagagcagaacaacagaatggtagcaatgcctactgtaacagtattggagctattgacacttcttgatagatgaaggagggagatcttttctgagatcccagatgctactcttccaccctttccctcgctgcaagctctttgctggtgcccaagtaaacaaaaaggaaagggttaattaaaagtgggacccagtggtataacttccatgaggtttccaaccatgatagggtaagattgggatgctacagcttttccagtgttatccacacgcctgtgacctttcatgtgatctctgttaacaaactcaataaagccactggtcttaccaagttggactctggtctaattgaactttggtctgcttgttagttaccatgtggagtaagtggacatttgcttgcatgcctaaggaaaaggtgacacagcaaaggagagcatctgacacacttatagtctctgtacatatagctgcacacatgtgtgcagatccttatatagatgcatacatgctttatttaggcaactaattcatttaaaagtgcttcactagcgatatttcactctatcatgaatgcttagaaaatgttaggtattgttaaaaaaaaaacccagcagaatatagaagcaccatgctatagttcaaacacatagtataaggtgatatctctctacctttacttcatcatctgaaaaggaagatttaagcaccatggggcagttagttcaaactggaggctggagacttgacacaagccagggtcatgtgagaagaggtgaaccttagttgagaaaatgtttccaataaactgacctgtagtcaactctgttttcttgattaatgactgatgcggcaaggcttggcctggtgtggtgtgggtgatgtcaccctggaacacatggttttgggtggcccaagagtaaactgggtgaatcctgggggaaagccattacaaagcattcgaccatggtctctgctttagttcctgtcaacaggttcctgtcctgcctgtgtttcttctgatgatggacagttatctgaaagccacctaagccctttcctctccacattgctttggtcatgttgttttatgacagtaagagaaaccccaaaccatctttcttgtagcagcacagtggatctggcacccagcacagtagcaggtataaagcaggtgctctattaattgcaataaaaaaagaacaacatagtcatgccatattattctggagcaagcgacaaccctttgatgttcacttctctagagaaaggactcagaaccggaccaaggacacttctcccttagccagaacagcaggccattttccatagagcaccatttactgctggtgattttgctgccttttggctgaaagacccagtcctgcatttaacttcttttgtaagtagatgggttgtctgtgcactcaaaggccaaactaaccatttgccaagtgaaaggacagttaatcactgggctttttttgcctctggaatgccaaaaatcagtttgcccaacctgagaatatttgattttggcatcaggttagccacaatctgataaccaattaggagtacttgcagatttggactaacactttggctaccaggcttctgtctaatgtcgatgaactggaatccattattgctgatgtcaaaatagcttggcaatgaattgctctttcaataccctgtgcctgttttctatgcaaatagcgatcagatttacggaaccttcagagtacagtcttagtttagaaatcaacgtaaacaagtggactcaaaggttatcaaatgtgtaaagtgcatgaaattattttgtgattgcagcgtgttattaacatctagactaggggtcctctgcttcagaaataggacctaaagcaaaattgtagaacagagagcatggtggtgaatatctcacagacataaaacttttatgacagagaagtttttattaaggacagcgccctgtgtggagtgttctattcaaaatagaagtcatggaacatttagaaaagggacaatggattccaggtgtctaagccaagactgacctgcagagttgtcaccgcgacaaagaatgtatgtgtactacatcccatggaggttcttgtaatgggaacagatttttgtcctgaagccttacactctctcctggggcccataaacgctcacttttggttcccttcagagtctgttctgtagtctactaactttttaatcactagtgggtacctgtaatcccatgcctaaaagaaaaatatatttgtagatgttctacatctaagcaaataataattccaaagttctaatcttttttttcctcaaacattgtgttatcctccaccctgcctctcatgagcacagctctgtattccttttgtaattttaatatagtttcaggcatatttatttttaacttcatacaaaataaggatcatgttgtatcttttctttgaagaactattaatatttcctaaatgttatgttaagatttgtctgtataggttatatgtcactatcagatatttggtttgctaactttataatactttatattaatattctatatatttgaatatatcacactctttatctctgctaatgggaatcaatgctttgcatgcccctagttaaacacttttaaacttatttttattcatttagatttttctctgtgtatgtatgtacaggcacatggatgtcagaggacacatgggagttgattctctccttccaccatatgagttgtggggattgaatttctatcattaaccttagaagcaggtatctttacctgatgagccatgtggctggcttgcccatgttattttaattagatattgaatattttcatacatgtcttaaatgtatgcagtaatttctattaggtatattcctggttgtgaaattggtggattataggctatctgatgttaatattgaacagtagtttcaaagtagtttatgaagaggcttatcacatgtatacatttaccattaatgtcagagtgaccatatgggttcatatcctcctacagtatgaacaagtgtagttataacttaaattcaccaacagctgaagatgatatttttatattaacccttaggaccaagagctgagaaggggaaggtttggatatgggctttgtgtcactattgactattagtttttcttgctttataatagcctagtctcctgatatgtgagtctttattcctctgctccagtgaaccatttctaacctgcgtgcatgttacagagtgcaatcctaacacaactgaagagtgacagagcacattgccatcctcacacctgtccggcaagcttcacaggatgtcgtcagcagcaccctcaaaagcaatgtggcagagaggactcaaatgctgcaattatttggttcagaatgccttaagtcaattgcaaggtcaaactctgatcttaggaacaagcatttctcacatatttatgtctggccctttaaatagaaattataagaatttatttcaaagcatttttaccttttgtccttttaaaactcgtttaaactttgagtagaataaaggtgagattaattaaaagattaagtatcctgtaagcttttgatgaatttttcactcaccaattcccaacaataatattttcagctggatcaggaataacacatgtctcttgagaattctcagtaataaaattggaggcatgggattcacagtaggaagctgagagaggtgagggtttgtttgtttgtttgtttgtttttctagaatgatatttcaaaattgtcacaaccctgctactgcattttaaaatttcacagtggtaaaattgtgtgtgtgtgtgtgtgtgtgtgtgtgtggcctgcgtgtgtgtgtgtaagagacacagagagagagagacagagagacagagacagagtcagagagacagacagagacagacagagaaaaggagagagggagccgtggggggagtttcagttgccttctatctctgtggcatgtgttggttctgggttgtgaacagttataggggatataaaatgaacagttgaaccaatagcaaggaaagcttggtttcttttaaatattctggctaaaaggggagaaatgcacttaaatccttggtgagaaagatctgctgtcatgcatggtcagctcagggttccggccgcagttggggctttatgtcttcattagagaagggttttaaaggaactagaaaggcatttgggaaaggctggctcctagtgtttatacaactcactcacacaggccaggttctttgaagggctctgggacagctcaagtgagaaattaatagatttgtaggcatcagagacagtgacttccagtgggcgaggaacagtttcagagggcgtggctttgtcatatggggcagaaccctattcttatagaaggaagactaatgaccagtccagctgagttgtgaaaagagaggttttatgttagtcattttttcaactatcaagttgtgggtcctagtgccagcctcaggctggttgctgctggtgtggctcttgtagctttgaggaacatgcaacaggcattcagtgggatgtttgccaagccccctgtgttcttctggccttgaggaggcatcccttgtgcagactgctctcttgtcatctacttctgtgtgcattaacaggaggaaggaaggtccagaaagtaaagtatatccaattagtggcactgcccatgactggaggtgacactgggtacaactgctctcatctgtcccctccaccttcagctccctggatctgggattactgctactgcctgactctgtcttctgcagacatgggaggaggctgactaagataaactgttcagtccctgttctctctgccacttgtggctcacatgcttgtcctttgccttctgtttaggactttttctctgtgctcccttcactggccacttgcccggtaagcagtcagcacggcatcaccctccttcctcacagctctgcacttggtaatttgtcttctctctcagctttgtggtccctgtccccaaagcaccttttgaaaaccacacttgcctaatgtcattctcccttgttctttttcatggaagcgacatgcttgagtatcatgaactcaagtataggcttttccccttctttttcctattgcggaaagagtactagaaatcaaatatttctctggtattcatattgcattaagtgttttaattaaccaaggaatggttgagagtatacataacagtatataaaagtcgtacacaaaaaccacatcatctctaaagtacagattttcatatcatattgaggtgaaccatgttctgaactcttcatgagagaataagggatgatcgtacttgtttgttgcctgcctacagcctctcattggtgctaagagctgtctaaactgcttattattggattgtgaaatactatgaaccagcataataatatttgttgaataatggagtggattcagcaaagaacgagcatcaaatgcataggaacaggagtgagcgaagccccatctgggcccgcttttccaaatgtgttttatctcgagaacacagttgatgctgcttagaagattggattcagaaaacatctgaggctgtgtctacacgaattatttgttgtgagcttgcctgcctttcttggctgtgtgttggcttagcttcctgtagggcagacattccaccctcttaggagctagttatcttgcctagggagcatgcttccaaagaccctgtgaggtgcctttgaaaactaatccatatgtggctgagcaaatatgaaacaaagtgttcaggagattcaaaaggaggcagaaattggccctctgcctcttccaccccctgtgctaagtactgaaggttgacatcactccaggattaaaggagaacacactcttgctcaaacaccaatatctgaaacacagggggaaaaggcttatagaacaaaactggccaaagaaattgctttttgaataaacgcttccttctccggagttgtgccatggcagataccgcttttagaaagagtttcatttcatttctcagtgagcatgtttttagaagcaggaggcctgaggaaatcaaactggtagaaatctctagtccctgtcagttcacaaatttcccaccttctggaaagccagtagagctcagccgcaaaggagcctggggtgagacatccatcaacagtccatgattacttcctgggagctgccctgtgttgcaatttacccctcagatgagaggggctcaagctggactttgggtccagcttgaatctctctttctgcaactgtgcctgtgttttccatgctgctgtgcagcccatgtgtacaaaagtgttgaccaaatcaaaattctccagagattagcaagggttcagtggtctagtgggagccagcaaactttaaaatgaacaaacaaacagcaacaacaccgttccaaaatagccatggcaagggctgaacgaattatgttcctagctgacttgaggttcatcaggaaaatgggaatggtgaagttgggtagtatgttgggaaggaaacagcagattagtgacacattgggtgggtggcttctggaaaggctgctgctgtcagactggtgaggtggcaaggatacaaagagggacattactgtggctaatccatttctgccataagtgtagaagtgagagtagaagatttttactaaagtgaaacttgtcagtggtctataattatttgaagagcaaagacctgctaatggaagaaattgatcttttgaccaaactctagtaggcaggctctcactatgatgggaacagccagctcatctcttatatgagtcagtcatggtcctacaaacataaggctctatgtggaagaatttaacagtgaggggatcctaaaaatatggcaagccatacttcatcctgtgtatgctgatgattctcaaccctcacagcgaagctctgggctttcagccctgatatgctgtaagaaattttgcaagcatcacagcagggcccttgaaattttgtcatatatacatctcagcatagctatggagattattctcctgacatgtgcctctgatgtttcagttgaaaccagctctgctcaggaccaggagacatttttgatgtttgtttgactccctctaacacagtttttaggggtaactgcacaatctagtgtaagttgtttaaggcagttttctgatggcatgtgagtaacctgaaagagccactcttgtttgcacaggttttatggctacgttctatattgtcatagtgttcacagttagctgagaaatatctagtccagagctcatgtctcatatgccgctttggtaattggttcaacaatgtgatactttaatatataattggataagcaattggattctgttatatagtacagtggtttggcataattattttccaattctgtggtttttctcattgataaaaactttggaggttacaaattcttaaacatcaacactctatacttctgaaaagagggatgacactaattaatagaggagctgattcagcattctggctctgtaggcaatacttacacatggaaattatttcaagcatgttatggttaaattaaatctttggcaactaataaaatgatgggtgctctgatgacatcctgaatttctctataacctgtcaaataactggctttggcatgcctttagtgagtagagaccactatgagattcatctatgtctatgagattcatcatctaagtagaaaggtatcagcgaatgcattgttttattgaacaaatatttgaagagctcaagggttcaaaggaaagagaagcaacaagcaacaaccccggggtagggcaaggactgagcagggcttggtggtctcacctgtaacccatttgtagaggagtccaaggcaggaggatgaactagaactacatagtaagatcctgtcacaaagcaaagcaagacacaaaagatcatttgtcaggtcacaaagacagtgcaaatattggcaagtttgctcagcactcagaaaaactattccttgttcaccacacaaagtgctgagagaaggcagaggtgatagggttaagcaagacataaggaatcattgtggatagtacactgcatcttagtgtcaggggaagatggggcatggtttcttgaggactttggccattgtttgactggatacaggcagaacagcttgaggcaggaagagaaagatgttcacacaggttcagggcagtttctgtaagggaaccaggatgcttgtactttatggacaagtgccaggacagaacagctatctataaggaaatgctaagctcatggctcatgaccatgttaagttataaggaacccaagctccacatacccctatcccatctctcattgttctcatatgccagctaccataacttatcccctctacctcatcttccagtcattccttagggaaagttactctgtcttttcacctctctgcttgtaactctataggacctactaactctgcacacaaactaaaacccacactaagcatatctacgttttggtaatacatttttcaaattaactcctgttttcaacttcagtaagtgccctgcacagagacctcaataatttgccataattgaaaatgatctaaagaaaacaatcttgtggcagatacggtgacattctggatggcttctcccactgtttcagaagtcatgttggtgctacattgggaacatattgacactcattaagactttttcctccatcagttagtagagcctaaaacataagtaagaagactagaattgaaagttagataatgcttattttaaaaaattattttattactttgtttgtatgaacattttgcctgcatatatgtctatgaaccacgtgtcctacacacacacagaggacagaagagggttcaaatctcctacagatgatgttacaaatggttgagaaccaccatgtgactgctgggaattgaacccaggtcctctgcaaaagcaaaatgtgctttaaagcactgagcacaccccctagcccacagattcaaaggtatttgtagtatgcatgtgtagaactggggaccatcttctggacctctgacatgtgtgtcctacctttaaactcttgggatagtcaggtcctggttagaagctgcccataccacataagaaagctgctgtggttagctgatgatgacacatgatataggagacctggctcagatagcacacacagacagcattttcgttgctcatagaaaccctttctcatacaaggtattaaacccattccaaatctgtgatgtttaaatacaaactctattgcaggattttctctgtccaaccacattagggtagtggcaggcctgtgattgtacagggaaaaggaggtggagctaggagtttgggggacagagagaaatagagaggttgcaagaggggagaaggagagaagccaacatggaggcagacaagcaagaaaatgatcctgatcccatgtggtcttaaacagccacaagtagctaagctttttacaaggttagaataattgggttaaagctttatctttatcaattggttctgaaattattgtattggcattttgtaaattgtgatcttattgttatataaatctgattggataattaagctttaagagtcctgtttatactgggtaactaggtgttgaaatggctgattgtgagtgtggggggcatttcatgaaagtgagataaactctcaaactgggagagagtagctcagcatgagaacacaccaagcagaatcccacgagggcatagtgttttggtctgccactggagtgggaacatggacaggcagggcaggagagatggagagatgacttttttaatacttcctgcaacaaaactctgatcttcaatctagagaactaatctccttttccaagaacatttggatgggacttccagtccatatccatcattccaactcttattccatgatgcatgcatgaatctgcctgccttattgaataagactccagaagacaaggattttcagcttaaatatcaagctatcactcataaaactgagtccagagcctggaataaatgtgtgcctgataaagcagttgagagcaatatcaagagaatcatctttaaagatgaaagatgaacttaactgtcctatttaattcttttccattcaataatttactgaccttaccttacaaaaacagaaacattcacccatagaaatgtttatttaagctcttttgtctgtattttgctctataaaactgataataataaaatatatccctttattttttttaatatatccctttataagtgcggccaggtttctcctcagatacttgctctttaaggaacacattgaattggttttctcccttttgaaggcagcttgccatctattccaggttagtcccacattctacaatacattcaaacgactgggaatcatttctcctactgtattccattacagaactagagaagcatcaatagccaagacagcttgagcatcccatgggggaattaatcacttccccatatccttgtgataacacactcgatgtgcaggggggggagcatgtcagaatccacacagatcagcacttctagcagaaatcctcttaacacttcctgcccggagaatcatttcaagcagatcaagtgagatgactacagatacattttttaaaaatctcttttcaaaagttttatagaaccagagctcccttggaggagccatcacatactttggtgtgttgaacaggaataaagtccttggttcaagtttttgcaaactttgtcactttgctacagaccttccatcaaataatgaagcacctgtgaggaatttcaacttttatggcatcagaaagaaaagagccgtgatgtgagcactgtcacagaagctgagtcacgtttagcttctgggacttaagatagagatggagcactccagtatatcaaatcctagtgcagtcagaagtgctgctatgccatgtaccactaaggaataaaaaccctgacaagcaaactgcaacactcttgacaacagattacattttggtctcagagatgttgaaatgtgaagaagtgtacatcttgtgaccagtgcactatagaattacaacggtgctcatgatttgtataggacacattacagtaataatagtggcaataaaggtacatcatgctattcttgaatttgatatgtttgatcaacctgcccccacattggtccacagctaattcagggacaaccagattattagctgcagctcacagtcttcctatagcaactttctaaggtgagttaccagatcaaatatggaagcccttttaaattttgattttggacattaaaaacacatagggctggaaaaatggctgtgagtaaagtgtctgatatataagcatgtagattgaatttggtccccaacacccagggcaaaagatgtgcctctgtactctcagattccagcatctcgtctagtgagccagtgtagttgaatcagcgagcttcaaatccagtgagacactattagacaatacagtgataacagaagatatctggcattgaccaccaggctttcccatgtgtataaaaaaaggatacatatatgcctgtacacacacacacacacacacacacattttagtataaatatggccctagattatttgtgaaatgttgctacatcaaacaattaaataaatgtcttactaatgatgaatgtaccaaacatggcaactgtgctctaatgagagtttggactgcctttgatctttccatgtattttcactcttggatgctgatttgcttattgctaataccctacttccaccttgtaacaactaggaagctagagattactgtgaccagttatagaaccgaaggatctaggttctgttttagacatatgccattagaattaatgaacagggccttcagctctgactataactttgtgtacttggtgaggtcaataaggccacaacatggatgccactaaggagccatcaaaggaggtatcttattcttggaagacttgctaagcaacttagcaacttgctaaggtggtcagtggtcacttgtgaggacagtgtgtctagcctaacactgataataaacaacagtggcaacagccaacagtaacaagtactttctgtgccaggcactgttgacaagtctttccgagctttccttttacaaaaagggtaacagaggtagaggaatttgtctttgaaactgttaaaccatagacttagactattaacatagactgttaaaccatagtcttagggttttattgctgtgaaatgagattgtgaccatggcaactcttataaatgacatttaattgggactggtttacagtttccaaggcttagtccattatcctcattgcagaaagcatggcagcatgcaggcagacatagtgctggaggagccaagagttctagatcttaatcagcaggcagcagaaagagactgtgttccatactgggtgtagcttgagcataggagaactccaagcctgcccctacaatgacacgtttcctccaataaggccacaccttctaatagtgtcacttcctatggccaagcattcagacatctgagtctataggggccattcctggggaacccttgttagatactccttaaataatatcctctttcctataacttttctggtttttccccccaccccacatactaagttcagggattaaacgtacgcctggctatgataagaccatttctttgtgaaatctaggtgacatccacccagctctgtccatttggtaatcgtatagtactagaaaccaaccatttagtgcctgtcttccctgggtgggtgcctttgactacaggagagaacactggttcttggcactggaaggacagataggacattgggtatgatagttaattaggcattgactttcccttctagcagcctaatctggaaattcgtctacaaatgaaacttccctactatggctcacacaaggcaaatctgccttttgggtaatctattgcttaagatcatggagttcctatttgttagtctggcaacagatttctgtggccacattcttagattgcctcagatacttttcacaaacttctgcaggtttatatttttttagtttccatcatggctcttgtaatgcacaagtcttttcctcccaggttgtcccaagcctcctagttcctatagagactgcagcctcctgcacaagttagcatcatcaaggtacttagacaaatcttgccttccagatgccccattgacttacagtaaacaaaagtaaagcactctccaatgggatttacaaaggacagatgcaatacaggtccttggttgttatctgcggattcaagcaaccactgatcaaaaatagcaaaaaacaaatggcatctctactcaccacaagcagaatgactattttcacatcatttgtgcagtattgggatttgtagataatttgcaagagggaacgtacgtcagattatatgcaaaggttatatgcaaatatatgaattttatatctaagacttaaacaactctagattttggtaccctacgaaaagctgctgtcaccatggatacaagttaccagccatgcttctgttcgtataagagcccttatctatatacattgccctctttcctttaaaagtttagtttttttttttttttttcttttcaaattctctaaacattgagtcagaatccttggtgtgtcttttaaggtgtgtctctagcaagtccactggtaatgcaggctttagctgttttttttcagaaaaccacaagctttcaaccagagtcttcaaaagttttattaataatagtcatgtccaacagaacttccgaaacatgtttagtttgtgctattggttctttagttcctggaaataacgtctaagcgctgccatctgtaaggcatatgataccaacagagggtgcctaataaaccaggaagcattaatgttctaaattatttggcatcagctagtatggtctgtgttgacaagtctgctttaagcttgatttctgtgtcttcctgtggcaatgccacagtgggaatgccatgttctctagctccttgtctcccccatcaaactgttagaagatggatttataacagacctaaaggtagtagcaaaatgaaaattagttcttgggtagaatagcaatcccatttgacttgcccatagcaactgtgtcatatctgcttctacgagcaagaaaatgacttcttaatgtacttttcttccactaagaagaattaaatctgtgtggcaaaatggaaaaccagtgtgctggcagccaaattctgaaaggaagatccatgaccctcataaagatatttgtggcctagttctatgctaatgaacctcatttaggctcagacttgctcagtgtggaaatatagccctgctggagagcgagggtatctttcccatactatgttgtcttccacatcaaagttgctctgagacaaatgggagaaattctttgtctgctataggctgccaaggtggaatccctgaagtaggatgaggtattgggggttcaagaaaatgaatattgctattttagttggaaatttttattagtattgtgtatattgtatgtaggtggggttagtagatccacatatgcgtgtgaaggtcagaggacaagtgtgtggagtgattctccctgttcattttaccatgattcccagtgatcagcttgtcatgttcctatgttactctttcagtctgaatgttttgctgagctcacaaagttactttcaaagttcatgttcaaggtgagaatatatgcactgaagtgtagacagtaactatggaattgtgtagattctccaagattaaggactggttagggaaaatgctggcacctagcattatctacctgggtaagtaaattaatttcctccagggcagatggagttagatagtgtctgcctaccaatgggaagctgtaagggttatgtgtgaaataatgatcagcagagacactgcccccaccccacattagaagtgttggccaccattggctgcactattcaacaattcaagtctacataatacaaatcgctagactgcacctgtgaacaagcctcatctatagattactactgcactcatatagccacaggaaggaaaggttcgataataaaactgaaatataataggagattaaattcaactgaaaacctgctctctgatagaattgacatgtgttcactagatacagaaatcttacacatagacatgcttgtaaatatatatatgcataccatttgtaaatatatgtggatatgtattatatatgcttatacacagagacacacacacacagaatgctctaaaaaggaacttaattaactaagttgttaatattctgtactgttttctcatagtttccattatagccggtgcacttggattcacaatgctgccacttcttaaaagaaactagaaaaaaagatctgataatggaaaatgaattcattcacagtttaggcaaatgagtgtctagcttctaagtttcttccagccacagtgtttctaactccttggagctcatacaatacaatgaaaaccagagagaatgaatggtaggtaaactgtaggccagaatgaaggatgtccaggaaggatggctggagacaaggcataactgcagtcaaggaaatcaataacagaacggtgcctgacaaacagaaagaggcatggaggctgtggtggatggtgggacaccatcctcaccaagctcccactttactcagcctcagtctgtcacaggcttatcaggcaagcatacagcagcagcggctccagtacagcccagccttgttattctattggagaagcaagaaatgtcaaatcttatgcgaaactctttattttcgaaattgggcaattaatgtaattaagatacacctacaggcctctaatttgcaaactattttcactcttcctctctcccccaatgttattaaaacacaatctcacggactctttaataagcctattacattttctttctccaaagctccagaaacatgacagagaagaagaggactcgccagccttttggagatctgagaaggagatggctgcagaggcggaggctctgcgggtctactttcaggtaaacattgtcaaagtaccttttattctcctgctgtagtgagtagtgtcttactgcctctttctgctaacctcggcctagtcctcgaagcttctagcctcggtacagtcttatctaggcctagaatgttttcagcttctgaggcttgctgctgagtaagctcgccctttctagtcctctctgaactctggccggctggttcaacaacgctcttctggctcaaactcctctccaagctgactgattcattctggcttttgtctaggcctcttaattgctctgcttggtctcaaagtaactctagcaattattcctaatcttctgctccatctcattctctggattatcctgccttttcctgtgtcaagcttgttctcttttaaacctgtctctataaaactctcctgataaaacgccctccttctccctctctgtgctgctctcctctcctctcaactctactgtcctctctacaaactctactgtattcctgcactggactctcttttcctgtactgtctgtctctccctaagtagcttccctttcctttctcttgagagttggacatatcctattttgtcaaatctttctctgattcatcactttttctgtagctcaattagacatcactttcgaacatgggtgctttcttctacaaactaactttagcttcattgtttgtgactaaaggtgagagactgtattccagctagagggattaaaggtgtgtgctaaagactgagccacaccctaactagaaacaggttcaaatatccggtaacatgatgggtctcagaaaagcaaaagcaatggctgggaaggaggatagatacatggcaacaccaagtctcccaaaggggatgaaaaacaaaaacaaaaacaaaaaacatgaaaactgaggaaaccccttgacccatatgggacttacccacatcttaacactgtaggaatggccaggaatctggagggaaagtcaaaagatttccagggtcttgtgtcctggaataacaaactggaccaggagtctatggtgagtggtagagataggggtaacttataataaggagaacacatcacagcgagcaagcaagctagagagctgggaaactataggctctatgaggagagtggcaaacctttctgggccatctgtgtaacatcagcctctctggaatttcgagtttgttcacgtaactcttgctactgtgtattgttataattgcttacttcattgcagatctctcattatacgtcataaattaacttctagtatatatacagaacaaattatttagagaacttggcactattcctggtttgaggcatccactgggggtcttggaccgaatcccctgcaggtgaaaagaaaactgttgtatactgttttgatatgaaatgcaaagcagttcaaagacatgtgtatcagttggccaatctctcctcagacttccttttaaaatactttaattgctcagtgacccagagggccttcccctctagtgtcctgttgcctgtacataaagtttgggataatgtcaggctagaaagagcacactaaggtctccctccaagtgtgtccaggtactttcctccatcacaaaaagtgtccagagatggaacaaagtaatgtatgagctgagagggaggattgctcaagggttaagggaagaaattcagaaatcagtcaagattgtctataagagcatttacctgtttttctctttctgtgatttttgaatgcttcagattttttctatttcttttcctacaaaattctgtgtaaatttttgatgtgtgcagcaagcaattttccaaggccaatggtaggatggtcatgaagcaaaggatacttggcatcctcagtaggccatggtggtcgcagccattacagttcccttgtgtagccctacaggtggtctctgttttctctctgtcctcctgcccctcagctcaagcatgctgctgcagccaagcactgcaaagctcagttcattatgtcatgcatgcaccgagtcagaggtcctttgcctgaaggaacacagtgaagtgtagcagaagctattgcttgtgttttatttttaacctttccctctgttcaccttatattctgtctgaagagaaggtttggtaataaacaccagcctttgggatagaccaaacactgctttctattcaatttctcttcagaagtctggtggatcactttggaatgcccagatgaaatgagggtcccacatctcgaggttcaatttattaggctgaaattgtttttctggcttcctacacaatgggtgttttgaagtagaggcgaggaaggtctagaattttgcagaggtctttgtggaattataagggtctacatcagaatgggtcatatatatgcattaagattttaacttctaacccaagattcttacatgattgttacctgcttctgcaccaagtcctgaatttacctatcttctaagtgaattcatttaactggcaactcttcccagaaagacatttgtcctaggcagtcatacaaaccattgggcaccatgcctattcattgatttaattaactaaaacttgcatctctctttaatgggcttttgttcagactaaataaatggcctgttgggaaacctgatataggtactgagactagaaaaaatacagtaacccctgtattaaatagtcggtcttcaagttttaccaagaggactgctgcaccttgcaatacaaaggaactaaatatacctccctgaagacatatagtccttaaattagtccctttgtttattagatattggccttttcattttctttttttttcaatttttattagatattttcttcatttatatttcaaatgctatcccaaaagtcacttataccctcccccgaccctgctctccaacccacccactccctcatcttggccctggtattcccctgtattgggcatataatctttgcaagatcaagggcctctcctcctttgggttttctttattgtttctccttccctttttagatcttggatggttttgttcaattccatcacctgtttggttgtgttttcctgtaattctttaagggatttttgtgtttcttctttaaagccttctacttgtttagcagtgttttcatgtaattctttaagggatttttgtgcttcctctttaaggccttctacctgtttagttgtgttctcctgtacttctttaagtgagttattaatttccttcttaaaatcctctaccatcatcatgagatatgattttaaatacgaatcttgtgttggggtatccaggactcgctgaggtgggagtgctgggttttgatgatggtgaacagtcttggtttctgttagtaagatttttatgtttgcctttcgccatctggtaatctctggcgttagttgttctagctgtctctggctggagcttgttcctcctatgattctgttagcctctgtcagcactcctgggagtccaactttctcctgggtctcagttctcagagtactctctgcaggcaagctctcctcttgcagggaaggtgcacagaggtctggcattcaaatctgcctcctggctgaagatgaaggcccgaaatggggcctgtcccagaagctatgttgcttctgcagccttcgctttcctgtgcagactagtctctgagggacctgggatacaagatggctctctcacatgccctggcagtcagagtgacctttccatttccaaattccatctttatactgaatttgtatacagaaaaatctagactaatgatgtaccatttggatttacctagacttaagaaagtatcttctgtttatgtaaaattaagatgatcgtcacttcactaggccttcctgataatatggtcagcagtatatctgccttgggcaggatgactagaaagacttgctttgttgctactctacaaaaccttgaaattcccaagaggcatagtcagagatgggatggggttctgggagggatgacagtcatggatagttactgagaaggaacaaaaaaaatccccactactataaaatcccagctcagccatgttactttttctctgtgttcagtggtttaggaaaggcagcatttacaatgtcaacaggaaagttggacctatgggctcactcttagctgttacactgcttattactccagcaacttgatatttccgtcactagctcgtatggtggccctcaagaggtcctcttctgcccttccagcagcctttctggtttccttagaaagagaacactttctcttccactgctgagttcctttacccgtctctctgccaccccgcgcaaggtagtagaaaccaaaatgtgtccctatttcacaagtgatttggccctatgggccctatgggccaaatcagtaagtagtttgcaggttaagggtgcttatcccatgaagctgccctccttcctggttactcttccatctgaccatgtgcctgagcaatattacattgggtgggtccattctacattgctccttcccttttctcatattttctcttctcctttgtatcacctagggtactgctggcttattatttccttgattcatgttttccattgcagtacatttatcttaagctgggtagccttgcctcagtgtaaaaaaagaacagtttctaattagaagcataaatataaatagaagagagatatagtgcttatgaaatgccagctgtccgtagttgctcacctaaaactaccaagactcagctaccaattctgtcatgtagaaaatgaggccactctctcctcagcttaaattctaccaccaaactgaaaccctgcaattgcctacttgatctatttagaaacattgaaagaaagtcatttttcagagatttaagtattattcccacctttggaaaatgaacagtgaaaatcagaattcaaactcagagtcagctgacccagacctacagctcccagcatgggcagaagataaggtccagggggaaacacaggctcctatatgcccctgccaatcagaataccactaggtcgccatttcttgggaaatcatgaaaaacaaatactaccttgctgggccagtcaaataggaatatactggttgctgggtgaagctctaactgtcttgatgcctacctgacagaccctgaggagactgggctactttggttctgggaagtcagtgcctcctctctgcctctgtgaatttatgcattggctccctgtacactcagctgatttccaggttggactttgtggtgtgtcttttagtctttctaaatcacgttagatgacagtggatctgcatctcctatcttaaccttgcctgctttctgaagtgtgatgaatttccatgtaggtatttaacacttggatttgctgcctctctaattttaattcaacatgatatgtcccagtgggacatgatgctgtcgtcgcctcctccccactggaaccaagggatctctgctgtaagatatgcagatatcaactcccaacttggataggaattgaaagcaagattggtttgcacagagggttctgtcagtgagatccttcataattcatcgcactctcttaggggtgtgtcattacgctaaagatagttggttgtctctcatttgcttataataatgcagtgcaattttaaagcaaatgaatcagcccaaaacagcattattggtagttacagatatcaagagagattttgtcaccagagttttgttgtttttttgtttttaatttaagccactataatttcagctgctggagaatcactgatagccacaggcagcaaagggagaaaaggtctgcctggttgtctacaaattatgtctcttaaagtctaccccagtacccatagctagtgtctgcctttcacatgaacagacaccaatgagaaagactcaagggattcatggaagaaattttggggaaaaaggtgggcttgaagttcatcttgagggatttagtctgcatccccagggggaggaactcccattaataggaattaaactatccatctggccttttcagtcgccccttaattgatatgatcacagctttgctttagcatggtacagttagagatggtgcccccttcagactgaagatatttgagtaatgttcatctttcattttgtcaggaaagacaatgatttaaaagaaccaagaaaagggaattttaacttttttttcttagttcttgtttctgtggataattcagtccccttcgccccttgtgttacatttatagaatatgttttcaattgcaaggacataaagataaacatgaaccaagtccccaggacctgaggatgataatacatagactcatctgcaaatagtcaaatataatgccccatgaagtggctaatccagaatgccaatcggttactcttttaatttgttacagctgttcataagacagtctaccccaatattaaaataggctttatgcttggtttaatattttgctgggatcctacttagaccaaatagattaggtaaaaatatttctgaggccactaatggctaaaagttcttagataggggtgaaggcaaggggtagacttttctaccaagctgtatctctgcccataatagaaatgggtaatatcacaggttagtttatctccttgtgaattttgtaacttcatgggccaccaacatgaaattattttcaggaaagtatgaccccaaaataactatggctgaagaaatgactcaatggttaggtacacttgctgcttttccaggggacctgagttgagttaccagcagctcccagttataactctagctctaggatatccagcatcaccttctggtctccaaggacacacacacacacacacacacacacacacacacacacacacacacacacacacacacacacacacacacacacacacacacacacacacatacacacacacatacacacacacacacacacacacacacacacacacacacacagacacacacacacacacatacacacacacacacacatacacacacatacacacacacacagacacacacacacacacacacacacagagagagagacagagacagagagagagagacagagagagacagagagagagagacagagagagggacagagataaagacagagagacagagataaagacagaaagacagaaagatacagagagagagaaagagagaaagatacacacagagaaagagagagagcaagagaaagaaagatacagagagagagatacacagagataaagagaaagcgagagaaagatacacacacacacagagaaagatgcagagagatacacacatacacagagagagagagaaagagagagagaaatatacagagagagagagaaggagagagagacagtgagagagggggagagagagagagcaaatctttaaaaacagaattttaggctctctatctctgtctccagaaatggatggctgcacattaatcagcatactctgctatattgtaaaacctccttaaataaacctgttctctgtcacgaggtttttctttctctacttgtttctctcacctctgacagtcttctccttccagtgtatgaattttgtcttcccctgactccttcctttatagcaacagacagagacttctggagagcatggggggttaatctgaaggaaggcaatgaaaattcacattaataatccttgaccttgccacataataatagctaatgttcattgccctcacctgttccaatgcctacagtatgcctcagccgcctcttcatagtaattgctgcattattttgacatgcacgaacatcactcaagttatcacatcactcaacttggattatccatgctagactcaccagcaaaagtagagccttctggttttcactcttctccagtaactctaaaatatagctcagtatgttcagttcttgagttgtaggtattggaaactgagtattttatttataaaattgtcctttgcccatggcttcagaatggcattctgcctatatagatagataatcattgggatttataggagttggaacacagcaagtgttttgagtagagtaatgctattctgttgctgtgataccctataacataggcaaggaaaagtctagtttgattaatgattccagagagatggtatctactgtgtcatggaatgcatggcaacgggagacaggggtgggaatcttgctgatagaattttcacttctaaataggcaggaaaaggcaccagggagtacagcaaggctataagccctcaaaggcagtccctagtgatatattgcatctataaccttcctaaacactgccatcaactggggccaagcctcctaattccggagctctaggagacatctctcattctaagaaattctaagaattctaagaaatgtctaagaaactcaagatgcctctttaaaaccaacagtatgatactttcatttgtgagctaaagtattaaatcttttaataaaatgaaagtaagtagaaaaagataatggaagtgaaagttctttgtgaaaggcacaatgatgactctcaagctaaaaattcttaagcagtggaagtatttttctcaaataaaatttgccaaaacttctgtaaaaatctcagatgatgtaagaaagtactaagtagaattattgtaaaaccaaaaaaaaaaaaaaaaaccaaagcacaataccataatgagtagatttagtgacaaatttttcataaacaaaggggttagtcgactaaagcatccaccatgtgaaagtaatggtttgaaccatagtgagacagagagacaaagaagaaaaaatagaagtataatggaaaagtccattatatatttatttagaaattcgtataagatccagaattttagtggaaatattttaggtgataatgtctgagaaactttgaaaactggaggggaaaggctgtttgtactggttcataaaagtaatctaagctctaaggatgctgagacaggagaactatttgaccataggtattcaagacacctagacagcatagggagatcctgtctcagaagaagggtggttagggctgtagctcattctatagagttctgactgagcacacacacagtgaaggctttgatgctaacaaagtaaaagccaggtatggtggcgcactctgataaacctcaatagtctggaggtaaaagcaagaaggtcagaagtccaagattatccttagatgcatggttggtttcaagctgcctaaatatgcatctctctctctctctctctctctctctctctctctctctctctctcccccccccccccaccccatgtgtaaagtccaaaaattcaagaatatatccaagccatagcagggaaaaaaagagaatccttatgaagatgtatgataataaaattgcagcaaagtataaggaatcttttagatttaagaaatgtgtattttcaaagacaaatacaataacaataacaacagaaacaaaaaaataggaaaatctgtagatcatgatatttaagtatccaagagaaaatacctggcaagctagagacttgcatatccacgaagtccatgaactctccatgaatgctaaaaatttaggtcttcagtgttccctagtgcctggcacatgttaaaggactagtctcattctcacacatttgggaggtgacagaaaacaggaagtgagtatagtaagatgtcttaggtcatgctcctgaacagaactataggattcagggtctttatcttccactggctgcaatggagaatgcctgtattctaacatgctctctaccaataagcccaaatacaagatcgactgtggactaaacctatgagcccaaatgaaacttttctctttatgattgggttatctcaggtattttgtaggaagctaacaatagatgaggatgaagtaatcttttttttctgacaaacctaagacactttatcatcaatagatatattaaaggaattacaaagaaaaagcaataaaacaaaacaaaacaaaaagctattctgagctgaatgaagacagttaaaacttgtagacaactaagcaagcatttagaggatagttttcttttaattatgacttaatgcatttattgaataaaataacaactaaaaggtcttatagaaaccgttctgaacagttagagaaccatgaagttatacaaaagatgataatagagattaacagtacaatggcaaacacatataccatcatataaaaagatcaaaaagaccaagtcctgattctttgaaaagagaaatcaccaaggaaatccaatgttaaaaataaaaagacaaattcctgtgtagttagtgcagttgctaaaaagaggaacactagggcagaacatttgaaattttgggcgaaatagtcaagtttctagaaaaatatgattgatccaacttccagagatgtaaaagattataggaataatttaataatgattagagaactcaagctgtttcccagcaaatatgttgtaaggcccagacaaatttactggtcgaacctgccatgcaggagagaatgaagaatgatcctgaaactctgccagagcaggaatgggaagaaaagaaaaattctttgagttactctgaaaccaaaccaaccaggagaaatatggaaagaaatgtgcatcctaatggtacttggaaaagatgaagcgctaagtgatgccagataaatgggggacagacacacatgggttatgtgttcatacagttatcaagaggacaatattagtgatcagtatgaattctgctttgtggtacagtattaaataatgccttccttcagagtagtcaaagagaaaatgagaggatctgctcagaagatgtggattaaactgtagatcaaaatgtcatctacataaatattgaaacattggtacaactgtaagggaatttataagtaatggtgaaaggtcatcaatcctggtttgacaatgatataagaatgatcattgttgacatttgtactatgaaatgtactcatggtgccagcacacaacgaatgagaaggaatgagagatgaataaaactgtcattatttgtgggcaatacaataatatactcacaaactcccaatatgggaaatttattagaattagtcaatagacttagaaagatctttcaacataagaataatgtacacagtttcaatttctctatattcacagttagaaaggaaaatgttctaaaaatcgtctagataaaaagtataaaatgttaagaatcaccaaagatgacttaaatagacagagattaacagttttatgaaaactcaattttttcagacactttattttttttattagatatattctttatatgcatttcaaatgctatcccgaaagttccctataccctccccctgccctgctttcctacccacccactcccacttcttggccctggcgttcccctctactggggcatataaagtttataagaccaaggggcctctcttcccaatgatggccggtaggccatcttctgctacatatgcagctagagacacaagctctcggggtactggttagttcatattgttgttccacctatagggttgcagacccctttagctccttgggtactttctctagctcctccattgggggccctgtgtttcatcctatagatggctgtgagcatccacttctgtatttgacaggcactggcatagcctcatatgggacagctataccagggtcccttcagcaaaatcttgctggcatgtgcaatagtgttagacactttttaaattcagggagatgcaaacccaaagtttcatggtttggtcttggtgaaaggtgacaaattgcccctaagctcactgtagaaatgtagctgtataaacctaaacaaacagccaccaccaccatcaaaagccaagcttaaaaatattttgggacttggtctagagatatcagggcttaattacaacaaggccacaagacttaagaaagcttgatgatattggcagaaatctaagcagacagacagaacaatataagaacccagaatgatatgcgggcatatctgaacacttgatttatgagaaaatgacaccacaagcctctggggaaaggaaaatcttctcagcaaatggttctaggaaaattggctatccacatagaaaattaataaagtgaatccctgcctcacattgtgtataaaggttgtttccaggtaaattttaactcagaatgtgcaatataaaacaatagaggttttgaagacagtctagaggttatcttcataatttgctatagggaaaagctttaactaacaaggtaccaaaaaaaatctctttaagatcagcaaggaaaggttaataaattgctcttaaagaggaacttgaccacccccacccccaccccccaaggactgttgaagaggctcattgttagccaggagcaaaatgtagcttagatcacaatgaagtcccagacttgcttaccacagttatcaaagtttctgcagacggcctgtagtaaatgtttacaataatatggaagaacagaatcacacaagtccctagatcaggcaacattctattccagagcttatggacactcaatgagatggtaaaattagaaggcaattcatgaagcagccactactgtgttcaggcactannnnnnnnnnnnnnnnnnnnnnnnnnnnnnnnnnnnnnnnnnnnnnnnnnnnnnnnnnnnnnnnnnnnnnnnnnnnnnnnnnnnnnnnnnnnnnnnnnnnnnnnnnnnnnnnnnnnnnnnnnnnnnnnnnnnnnnnnnnnnnnnnnnnnnnnnnnnnnnnnnnnnnnnnnnnnnnnnnnnnnnnnnnnnnnnnnnnnnnnnnnnnnnnnnnnnnnnnnnnnnnnnnnnnnnnnnnnnnnnnnnnnnnnnnnnnnnnnnnnnnnnnnnnnnnnnnnnnnnnnnnnnnnnnnnnnnnnnnnnnnnnnnnnnnnnnnnnnnnnnnnnnnnnnnnnnnnnnnnnnnnnnnnnnnnnnnncgtaggggagggaagggaaggggaggggagggaaagtgtgatctaaggaaggtgggggcaggctgggtaatattccattccttggaacgggtggtaggaagatatgcatttcatcttgttttatattaattctgtaagacagttatgagctgtctgcagtttttctttctgtgtgtattatagttcaagaaaaagaagaagcaaagacaatcagataagtgagaaaataacaacagcaatatacagggagagaaatgaaggtgtttagctagacttcactgtattgtctaattgctggctggatactcagttgttgcacgtaggcatagtcagaacaagagagtaactgttccatacatagcatctttgcagatgcattcccggaacatgtagtgtttaccaccccacttgatcaccatcgtccctgactttcagaagctacactggcaaccccattattatttttaaaagtgaatagtagagaccactgtggagagagtacttaattagtagtaataacttgtaatgatgctacgtaagaagagcttattatgaacaacctgttctaagcacttcatagacttaatttcaaacctctcagagattctccagttttcctgggctttcagaagcaagaacagaagctagcagtagctgtgacttttcccagaactctggaaattcgaggttcggtttatctaactttggatcaggtatttagcctttacaacacagttgctgtgtctttggaaaacacctgtctctaaagatttctaggtaactcacagctggaattatccaatgaagcagagcaacaagatatagttttttcttacttcttcactaacttcaggaacaaagtcagcatttgatgattcccattctggaggcttcctgtatatcactttagccagccatcacagccatttgctagggacttgatgctgtctcaagtttccaattatgaacttgaaaactcacacttcatcagataaccaggaataaaccatagctagtcattattgatgccaatccattagacactgcattcttgagtcagcaaggacacccacgggttccgttcatgatccttcagttaaacaaagggtcttggagaatctgccactgtttcttagaaaacatgtggaagatcattgaaagatttaatcagagaataggaatggaatggaacaaggcagatatttcatttgggaactatgaattccatatgaagaacttgtcatagcttctgaccccagcacaatcaattagagacctccccttcacagtgatgcattaatatgtagctagaagctttcgactaggattttgacgacttcaggcttcaagaagtttccaactcatcattaggagaaaccagagacagcagaatcctccacagtgataggagccaagataccaagaagggaggtatagtactgttagaaaagtgctgtgtcacttttcatcaagaggaaaatttgacactgggacatgttgcttgtcataaaaggattcctagctatatcaaaagaataaattgctatttccccagtggtaattttaaatgggaggcttgataatacaatcacaaactatttgctaagaactcatttcaagccaaacacagtagctgtccttccccattagagctgacggtagatctcaaggaggagggtgtccactagaacatgaaagtacatggaccctgggcaaagcactagtacattgtccaccacaactctgatctaactgacttcagacattgatcataccataaacccattgacattttatcagtcatgtatatctacctccttctgctcccctaaaacccccatcacatgccctcccagagccactttatgatctagaattagccaatgaattttaatgggtatttaatttttttcaaagagtgggagtcagtgctttagatgatagatcatgtaataattaagcattaaaagagctcaacagaagattctttttttgccagcagatatctttaggtcaagaaggtctataaaaaccggcagatcatttgcactcctttaagacaggcaaaaatcgactttgaatgcaattagatgctcttaccactttccctaaagctccgcatcttgctccaatgaggtaaaattttgagctgctggcatttagagctgcaaattgctggtgtgatattgccttaaagatatcaaagcacatgctggtatccaaatcatcttttaattggaaacagtgaaactgagtcacagctcccagaaaggggaactttctagagaggtccaaccttgtctctgcagagctctgaggagctagccaagctattctccctgaattacctcatctcttcctggcttctgaagatttttgaatgatctgtttatgcaaggaccatgcctagggtctaaagctgtccagtacccaagtattctcatgaaaatcttacttactctccctgaagatctgttgtctattcaggaatttctcaagagctcatgtatgattagcttcaacttctttaatgttttaaaaaagggagactaaatagaattttgaaatagtacaagaatttataagaaaagcattttctgaaaaaaaaaatctaagaactccctcattctgggtaagattgaatttcagaatacttcaattaaaaataccatttctttatatagaatatcatatgtaagctgttaagtctgcctcttaaaataaatatctatatcctctaagtcctccaaggttacaccatagaaattatgcatttaaatagaaaataaagttaagatcatgattcttcaatagaaaacaaggtcatggtctcccatcaacctgaagagccaaccagggatagatcacatgagtcctatttcatgccccacagcagtttccataatgtttttcttaatcttcttccttcttgctggtatacaatcacatcaaacactaacctgccccatggttcaatgtagcatgggcactcttcctactagaatagtttcccttccgactttcctccattctagatgaggcccaaatatctcctgcttataaaggtgtttctcaagtgcccaatctaaggtaatatccctatttccttcatcttttaactccagtcttccttgaataagggagtggggcccagtagaagaaaataaggcctattgctagttatggtcctggtctctttccctatagattggtgcaggttatgtcttgaacttttatatccttgagatagtgttgtagtcttgaggtgaaataaccctcaggttcccaaaagggggcaatcaattatctctcctaagattgataccgccaccattaatgcccctattttgattattgctttacaatattctatctacagttcagagactaaagtctcaggaagtgaaggtgtgaaatagtctctgttcattcatgttttactccagttttcaacccccacacctttaaaaaaattaagcattttctttaaaaaaaatgtatgtgtgaagatgtgacctcagaggccagaagttattggatgccttggatctggagttataagtggtgacgagctgcccagtgtggatgataagaacggaacttaggtccatggcaagaacaagaagcactcttaaccattgagctatctttctcgctccctcacccttcagcttttgattccaagatggactcacttgcaacttagaccagttggcttgtgagtaattgagacagatcagaacttccctgaccactgaactcccactaaacatcaaccacttaaggctcatcttttggattttgttgaaatgtcctgctccaaggtagtaagtgattatccattagtctgaagatttatttggattaaaatctgtactcacaaggaaaaagaacataatttcaccagttctcttaaataatgaagaagaaaggggtgggcactttaacccattagtcagctaaaagtgttgaagccttataaactgtgcgacaattcttgagtgggtgcctacccactatagcaatcgtgcctgcgattcagctccagagttgtatacactccaggaacaagtgccattaattaaacgacatgcttagcagactcttggagccattaattatcaaaggtagcctcttccatgcttggctctaaatgctattataacagaagaacgtgagttagctctaaagactgagctgaaagaaggccactctcacaaagcaacatgggaagaagctgtcaccgaaagtaaatgacaaagcacgatggcatttagcttcatctttgcctatttgcagcttctgaaagtgcttccagttgtagggaatttctcaaaattagtttatctcctgcaagatacaagtgaatagaaagtaatccttctttccttttgactgggtcgcataaaggtgtgatatcagcagaagatttggagacaaatagcgtctgttctcaatatgcccaaaggaaagaatggttctttcagggaaagtccctgcggggcatgctgcagacacagggaaatggttagaagcacagcaagcagccagcagagccttggcgcctatctatagtatgtaacaggaagtgtccaagctgggattcgggtcctcagcctgttctgtttcctgcccactgccaagctccaagcagacaccatttaatttgcagaagagacaaccccagatatacccgagtatgtaactcagagctccaagctttcaggttgtttttctcaagtctttccaattcttagagtttgatttttagagtccatgttcactgtcttagcagaggtgagtgaggcccagccttgccagagaacaattgtctccaccctaatttctgaaaggattgactctgtagtatacagggctgcattctaggttgcattctgctttcattgatgctgcagactgggaaatgcaccctgttgaatagaaagttaattagcccctggacatttcaggaagtgctgttattaatcagcatgtgaaacatgctacagagaagtaatttgaagtctgccagcatgcttggaagttgccctgctccccagatttcacactcacactgcagggtttctggaagtgaacctgggctaaccccttcctatctctcgaaggaaatgaaatataattgcattgtctcagagatactaatcagagaggctccctgatccttgccatctctccatcagcttttcctttacccacttactttaacacattactaccagtggcttttgtggtataagttttaaaggccagtttattaaggaaaagctgaagaagagaggtcagggggccttggcctttgaaaattgctcaccatactttggtgagagcagaatgtagttctgtagctactctgcctgccccactagcctgctgtgagctaagtcttttaaaagaagaggattgttaaataggttttgggtaaacctctccaggctgtgtcattggtaaatgtggttccttaattttcataccagttctgggcctggggtgatggcttgcaatgcaatcatgagggcctgagtttgcatccccagcacccataaaaatctaggtgtcgtggagtacacctataatctcagcacagggtggcactgatggggaaaacagaaacaggttagagatacctgaatggctcactggacagcctgaattaagggactgctaagatctctctctctctctctctctctctctctctctctctgtctctctctctctctctctctctgtctctctctctctctgtgtctctctctctgtctctctctgtctctctgtctctctctgtctctctctctctctctctctctctcacacacacacacacacacacacacacacacacacacacagagcaatgaaaacataccatagtattaatccccatgggcaagggtcactacctgcaaagatagcagtggcccctatcatgtgagtgaggaagacagatactctgtgtaaattctgtcttgagtggctgagccatgctactatctgaacacattttagaacagaagcacagggagataggtgcggaccttgtcaccatcaagtctagtgatttctgtccacaggtccacagtttctgcattctctagatcaggatcagttagaaggagcctggtacagaaatgttttcacctccccaggtgatcctaatgggcagcaagtatggaaccactactgtaaagagaggaaggaaaggctagccaatctctgcagtccaagcctccctttacacactatcagagtattttgcccgtgggcagtttctacccaggcatacctacaggagaaagacacagaaatgtcatatcagcttcagtgtagaagaagacatcctctttactgaagataaaaggggttgaagtaggagaaaataacctccttggtacacctggtaaaaagacgctgccttctatgtactccgagggcatggagaaaggggttctggagcttaatggatgaaccattaggatctacaatgtccactaaagtcctaggggctggaggcttgatgcccaaacatggcattatatggaagtgatggacccttaaagagtaaagtcctctgagctttggttcattgggctttcatgagattctagtcttttgttgttgttgttgttgttgttctatctgtttctagttcatcatgtggtctcactatcatgagtccaagcaacaggcccaactgatcacagacagattctccaaatctttgagcccaaataaacctttcagcttcatgaatttcttatcttaggatcccatcacgtaaagtaacagaaaatgggggcaacatgttgatactttcagattcaaaaagtcagtggggctcggttcagagggggatccaatggcatccatgatgttacctgtactcattgaaccatacaacagaacacagggaaaggttgaaggctttcctgtgggtttcagggaaagatggatgaaaaggtttctgtagtctttcctgaaaactttgatgctggtcttctttggggcattttcatttctcttctcaatccaaagctcccttccccaaatctctctcctactctatttgcaaagcaatggaaagtcctttcttttgcctttcatgaccttgaagaatgtgtgtctgacagtataatacattccccatcattcctcaagcatattctagagagaggatagttaacctgctactatgtcagtcaagaaccaacacagacttgaacattgaggtggggcacgcatggctgctgagctccctgattgtagaagcctgctcacctgattccttgtgatcactgtactggcctcactctgtaaaaagtattttacaagtgggctagaagcatgtgagggattgaacttcctcactccctcctgggatccctgtttacttgtcagtaaatcctttcattgacatccgctgggcagtggtggggcacagttttaatcccagcatttgggaggcagaggcaggcagatttctgaatttgaggccagcctggtctacagtgcgagttccaggacaaccagggctacatagagaaaccctgtttcaaaaaaccaaaaccaaaaccaaaccaaacaaacaacaacaacaaaaaagctctactgtcagtggtagctgtgacatgggaggaaactgtagacctgaagatgagcatgctgtgttaggtccattaaaacacgggaagatgggcatgccaccagctgcactctgcattgtggaggcataacttgcactggatactgagtgctgactctttagtgcctgcaaagatggcagaaatcatggtcatgaaaacaagagaggcagacctgccacgagggaacattgcaataccccaggcacatttgtgtgtttgtgtgtgtgtgtctgtgtgtgtgtgtgtgtgtgttttaagactctgcagctcctattcagtgtgctcacctcactcccctgcacgggcacacaacaaaactctggatacatctctcctccaatcctccaagtctacttagtgtttggagcatgaaaggtagacactgcttcccatgatactccagaccaggtatggaaatgaaactaccatagacagagagttgaagaggcagatggacatgtgggtgttaaggctgtgtgaaagatgtgttacagaagtggtgaaagtgggctgacaaagggccctgtgtagaaagagatagagcaaactcaggttacagagctggattgacaaagacaggtgggggaagtaacatgggctacaatgtccaaaaataaagctgatagaaacttctaggacataaatctgccatagacaggcaaggcagaagaagagagagggcacactcattttcagtccctcacaggtgcctctgactcaaagtcaataatggttcaaggatgaagtctgtgatgaatgtttagaagatgacccacatttccagacaagccaagtagtgctaggaacagcagcaaatggtctcagggtcatgtaagaataggacgggacccatctctggaggatactttggctcaaacgccctgctttcccaccttctccatggtacagccctgtgctcagaggagagaactctggtccagattaggagtgactctgcctctgtgtcatgatcattacacagacctgtgtcactctgtgctctctgactttgtaccaacttgcagaaaatgggtttctaaactcacaaaagttctccatatgccaaaggccattgtgtatatcttcaccaaggtgagtttgaatggatctaaagctaagacagccttaaatagagcccttgaaataaacagagagctagctcatcatttccaagtatcccaggtctacatcttctcttcagaactcaaacccacaaatggcaagccagatgtagaaggcaaatcaattctcttgtgggatttcttgaaaacaaagaggaaggggttggagccataagtcagaagttatgagcacctgctgctcttctagaggacctaaattcagttcccagcacccatatcaactactcaactactcaaaacagcctgcaacgccaaatccacatgatccagtgccattttctagcctcttcaggcacttgcacatacatacaacatgtagttacatagacacctacatatacaaaaataaaaaggtttaagaatagaaacaccagagaagtctgtgacttgtgacagtgtttctcaaaatcttttcatttatcacacgcataattgttgctcaattgtcttagtacctttcctccagtcttccccagattttatgagatacaactcataaagtcttcccatttctgcctttgctcccagctatgggatgctgccttcccagttgctggccacacccattttactgaggccaattattgaggtttagatgggttaaggctgcaacaaagaagggaggtacagaggtgtgaaatgtatttccatggccaactccacttatatctaaaccaacacactatagcgtcaagaaatgtccctattttcttgctagataagatatgataaggaggagaagtctaaccatcttagtagaaatgtttaaggtctggaacatgtccttaggatatctggcccattgtgcttccaatatgtaaagctgattctgccagccatacagtgctttaatgagtccctaaatccaggtgccaatgtcttcagtcacagccaaagcttgttttgaaatagatccctggccttctccatagacctgctcagtcagaatatgggggatagagtccagaaatctgtgttcttaagctcagcagagagtttagacaacagtaatgtttggcatgttctccttatatagcacatacaggctgaattggttcgctgtgtgtataagctttgaattgctaatgtggaatcctaagagttctttcagctgacctttggtaatgtgggtgatgggaaaaattcaaagaaagtacatggacccaaagaataagtctaggcatcaaaagtttgggaaccatttattgcccatagcttgcccatacctcaatatcatctcccataaaatgttaatggcaatccaaaggattaaaggtaaacaaactgatattttagttattgctgtgcctcagaagaaatgctactggttctaaccaaatgtctatttttatgttttgtcatttccaggcctgagagtaactcaaacgattcccaaggcataagaaaatggaccccattcttctggagtcttcgacattggaaatgaagctaaccactctttattgtaccccacgaccccacagccttgtacaaagaactttattgcatgtgtggaagccactagtattatgcttccatcacgatgacaaataggctagcttcccaaacagtggcattgacagcctgccaccgttcctcagttctgtacttagaatagtaacatttccaaactgtccctgagcctagatgaaaataaagtggttgctaaaatatttatctggtgttctggaaaacttaaacattggtattttggggtccccaaacagcataaatgaggaagttgctttctgggagctagtgtgtttcctgtgagccaaaggttggttatagtagaggggtgattggttggaagtgtatcattgggtaggaaagatgacagcacaggaacctttccttggtcaaattttcctgccattgatgcagaaaagtgaatttgaaggagttcaagatagccagagtagctctgagaaacaaggggacacagcgtgctgcttggtttgtgcattggtttgtgtttttgannnnnnnnnnnnnnnnnnnnnnnnnnnnnnnnnnnnnnnnnnnnnnnnnnnnnnnnnnnnnnnnnnnnnnnnnnnnnnnnnnnnnnnnnnnnnnnnnnnnnnnnnatgatgcacatctatgtgtgtgtatgcctatttgctttggtgtatttgttgatgtcagagaataactttcaggagttagttcttccactctgtgtgttctggaagtgaaattttgactgtcgggacttcctcatagtactttacctgatgagccattttgccagctctctactatgttcttttaaggcagggtcatcctggaacctggggctcactgattatgttaggcaggacatccagcaaaacccagggatccacctgtctctacttctccaagtgcttgaattataggcacagattatcatgtccccctttctacatggggtcagactcagatcttcacgctgatgtggcaggcactttactgatggagctatttccaaccccacctgcagtagtggggatgtaagggaaaggagcagagaaagctctcagtaactacctagaaactgtactcttctccatcttgctaccttctttaagggaggagttatggcaaaggctctctgctccaaagtgtcctagaaggggcttagactttacacagggaaatggtagcatggaaacagatggctgaaaaccatgtttttcttttcaacacaaatcctctttgagacctcctttggcttattggccattcctagcctgcaccatcactgacatgtggcactgcagaacataggtggcttacacctatcgatttttctctcacacaatttgagacagtattagcccctactctggctataggtggagtcctgctccatgccagcctcctgctgctaacggtgctgctgcttgatctcattgccagtcttcctctcacattgttctcctctctctctctctgcatgtgtgtggcttagaacatatctcttggatttatagccacatgactattctagggccaacataagaataccttagcttactttcatttacaaaggctccataagggtatattcactggtttcaaaaatttgaaatggacttatcttctaaaacccacactattcatcctactacttagggtgtttggtgctggactgcctctgctcttgtataacagactaggtatgactcaatgtgccttgtttaaaatcttattctgtctttaccaaagtagtgagtagccattgaccatgactgactgtgcctcttgagtggaaaactcttcagtcctcaagcctaaactatgtggctcctctcggagctggaagttagaagctttgtgatctgggcaggatgtactcagtggatacaataccaggaaataagagggaatggagaagatacccagaaataccccagctatatgcttgctcattggtcagtcaaacaaaagccttaaaaacaacccttcctctaccgtggagcttaaatgcctccctctttggcttttgtatcaaaaggacctgaaagcttgttccttgcttccacagttaattcccttctacacccactgactctgaagcacttgtgaatagcacttagtcacagggaacaattagctgaatcatcctgcaagtcatagtttggttttccatattgtctgtgctaccaaaaccctgcaaagtttttactttgcctctgccttttccaagagtgtccctacctcagtctttgcccaattctgggaacattgtgaaactgtgattttatactccacctgacccccaaatctatacattgaaacagtgtggtagaattaggctgaggtggtgcctttgggaagtgattacatcatgaaggcacagcctcttacagagaatacccatagggctgcctgcccctttcgaaccctgtgagtacagtgccatctaggatccaaaactgtgacttcattgaacatgcaatttgagcacctggatcttggactctgtgccttcagaactatgagagaggaaagtgtgttgtttaggagctacttcattgtctgtgctttgttcccagtagtgccaacagtctatgaactagaaagataagggaactgaaaagatcaagcacgaatgtacataccacaccaggcatttgagagatgtgctggaatctgctcttgtctatcacatccttcttccttgtctatatgatcatacgataaaccctgctgtcagaacatcctcatggcaggcattagtctagaaattgtcaaaacattaatgcaaacaatcttcacaaaacattgcttacaatggtaggcaaaaccatgcacaagaatataatattctctttgtatagataaagaggctgaggcttggagactttgtgacttactttaattacatgataagaatgcatgatccgcttgtgaagctgccctctttcccgtaagctgaagtttttctcaaaatgaagaaggaggaggggacaggacactgtgtgtgtctcacaggagagctctccactggctaggctcaataagcatacctaggttctcagttagaacttaactcagtttgggattaccaaggctcatttttttggtcagtggacatagtggacatccactaggtacactcagcatatctttcttgtgggaatcttctgaaaactatcaagattttcctggactgctccccagttttgctgcagacttctaagattatggtagtattcgaagaacttggagcctctttatgatttctccttcctgcctcctttgtccctctctcctcctctttccctattttcttctctttgccagaaaagctagatcacaaaaacaagtttgtgagctagagatgcatcatgaaagctgtgattctcagacttcagtctcaatctgcatcatcaagtgtgcttgtcagaactgcagaggttggagttggcaggatgattcagctagtaaagtattagggttggagtcgagtcccgtaatccacaagaaaaggccagaaaggttagcactcatctacaatgcagatactgaggatacagagacaggctcatctgctagtcagctagacttaacttgcaagccccgggtctcagtgaaagaccctgttctacaaaacaaggaggatcttgaggtggctaatcttggttgtgagcttgaagaaactgagaagagggaatctcaatttaagacttgctttcatcaggttgtcttgtggggattttcttgactatgagtggatataggaggggccagctcactgtagacagtaccatgcctaggtatggcctatctagaacagtggctgcgcacaagcaatatttctccattttctttcttcagtttctacttcctgccttcagttcctgccttggcttctctcgatagcagatcatgacctggaagtgtgagatgagataaaccctttcctccccaagatgatgttgattagtgttttctcacagcaacagaaagcaaaggaatgcagatggtaacaaagcagaacaccaggtactgacccatgaaacaagcagacaaacacctgctagcgagccattccctttagctgtccaagcacaattccaggccagagactgcatgcttttcatgctggttctagtaggacagaagccatattttgtaaatcactagtgtgagttgttctctgccccaccaaaacaaatcagatcttctcagtgcagaattcaggtcctgcatttaacatattttagtctggaggcaatgagctgcaagttaaatccaatcaggccactggagcatctccagcagggttttagagttatttaacagcacagaagtcttctctgagctaattaagtgattagcttacatcgatagaagataaacaaggacaggaaagtgggacagctatagctcatgactaactttaaaaaaatgctcatgactttagccacaataaggaacattggttaaagacagacctaactaaagaagattcatgtacctcaattgaaagggaggaattactcatgctaccaatggaatatgttactcaaaagaactcttatgcatagcctgcttcagtaggcttgcctggacttagaactccatcataaggtagggtgcagttccaaactaatgatattaaaatttgctctaatggctgtggtcaccaagcatccatagtgaatccaggcctcagcagaggcagggacaggtgtctgtaagaaatccccatctgtgacacaggtcacagacctacaatttaggagtcctgatcagagaatggttgggagttgaaatgtatgcctcatctatcatgtccaagtaacctttagagtcagatagaaccaacctgattttacaagaaaaatgaaattgagaaaaggttacctaaggtggtagtgatgatgttacataataatagtacctaatatttattgagtgcttatcatgaattatgctttcagcatttcccccaactttacaacagccctaaagattctattattagcccattttacagataggaaaatacaacacaaatgatgtactgtttgaccatgaaacccagtggagagaagtcagaacttggatttgagtccaggtactatggatttaaaatccataataacctctgctttgtgggcaagccaacccagcttgcctaagctctaaaatctatctccatgctacctacctgtcttagttagggttttattgctgtgaagagacaccataaccatacaacccttataaaggaaaatatttaattagggctgacttacaattcagaggtttagcccattattatcatgacaggaaatatgacagcgtgcaggcagacatggtgctagagatagagctgagaattctacttcttgatgcataggcagcaaagagagattatgtgacatactgggcatagcttgagcataggagtcctcaaagcctgcccccagagtgacacactttcaacaaggtcacacctgatccaagaaggctacacctcttaatagagctaaggaccaagcactcagacacatgagtctcctgggaccatgcctatttaaaccaccaaattaaccttttcctggagaaagaacagatggtcccttctcacacaaccctgaagtttaagttcctcagcactgtctgaagaagtaggctttgtatattcaagagactcatgagccgacacacccagccatctggcttcatggaaagtggatctactttggaactgagccctagagacctatctgtgagtacatggtggggaattcccgaagcttctttctccactgtgtatatttatgccccaagtacagcacgcctctgtttacctactgtgtttctcttatatgattctccttcttataatttctcaaatgcaaggagagttgcaattacttcattaaatggaaaagaaggatcccttgacataaatggaagctaacaatgaagatggatctcatgaaatatagaaaatagagcttattaaattctaggaagggactggtgcctgctgagagccctgctcactgaacagtcttttcactttattataaagggacattgacaagtgttagagagatgttaaaatgccctcacgctctttcccacaatcctgttccttgaggacttgataaacagtggggaatagctcctcagcttgtgatctgctaagtttttacatgttttgtttacagaaccttgtgaaaaccacattcctcctcaggtctgaagatctatgcctcccactgggagtaacacagaccagactatatgtgggttttcatgacccacaaagtcctggaaccatggtgagctgcctcctgcactctcatgagcaggcgcatctgggaagaaagagatggtgtgacattcaggtgcctctgagaaacagactagagtcgaggccagaaagcgattacggtgtgagagcagcagaggagacttcccagtcaccttcatcactctgaagagaaaggtcttgaaagcacctttcctctatcccatcccttgccattgtgttgcaagaataaataagcaggggaaagcagttaggaatatttgtgttacacctgtatctgccagggatgatctaatttaaagaggggaaatgcctgcatctcattatctgttatacccatgcccaagcaagaaaggaaaagggagaatgaagggaagagaaacacagacaaaaaggcatggtgatgtataccattcccaaggttgctgaaatgctcaaggcttgagcagcccaagacaagcactataccttttcttcccatactactataccaatctcttcctttataacatgggtggggcccctttctggtaatataaactgttgctgtagtgattaatctgctctacactcccagcaacagcagagcaagttctttgctacccattccaatgtgctgggttctcaaacaaaagacacacacacacacacacacacacacacacacacacacacacacacacacagagccttatgtttaatatgccttaaacagctcaatggctgggcatttccaaacctccttgtggctaatacactctcccctccaaaattcctgaattattacttaataaaacccatatttccatcttggctgcaccagacccaggactgcagcaaccctgagccacaatccctgacttgtatttgttggctgtccctctgtcttgtacttctcacacctggtctttctgcttcctcagcatggcacttctccccctacttggtccccttgcccatgaatcctaaagttccatctctgtcttcctgcccagctgttggccactggtaactttatttgccaataagaaccaactgggggcatggaccctcagtgtctcacgtgcagaactctcatgtaattttgggaacccataatgcatgcattaaactaaatccacaatataaacactgtcaatagaatataagttttaaaaacttatcatgcagccattttaaatgggaaaaatgtcaaggctatcagaactatctttcaaaaaagtacatgaagcacacggacactgttactgacaagggtcaacatagatgatgaggcagcagtggaggccatgggacaggcactgtgccttcttccagcaagcaattcatccagtaagagtgatgttcatcttacagataaggaccttgagttacagtgactcagtgacttggccaagactataagacattacatctcaaatatgtcagttaggcttgtccccaagtaggttttgcacctaaggtcacacttctaaggaccacagtctcctgagttacttatgaaaatgaacctagtattcattactatttctttgtaatagttgcacataatattatacatagttaattttatgtacttcaggtcaacagagacactaataaaagccaaagctttccccaaagctctattgacccaaggttagtttgccaaagatgcatgagtctcatgtctttctaacagcaaaatctaatttctttttttgcattgttattgcattctttctatttagatattctacaaacttaagggcatacaaacatttctttggaaattttcaaaattaggatatgcattcatttccactaggaatgtgctcaagtgctaagtagcaaagctacaagtaacacagcattatgtacattatgatacctaaaaataagcaattgctaagaaataatgtgtataaagttttaaattgtgaacagttcttgaccaggctttacaatccagaatatatcagggtgaaatattgttagctgtttcttttttgttgctttcattttatttataaactttagttataattttagacattaatgatgtgtgtgcatgcatggatgtgagtatactcacacatatttgtgtggaggccagaggttgacattgggtgtcttcctccattgcatgtgtttaaggaaggatggccttttcagatttaatttgtatttattatgattgtgtgagtgagcaggagagccaatggaggtcagggcacagcttttgaggactcattctgtttccactgtgggtcaagctcttgttgacaagctcatgcgacttatcactttgattttctgagccaccttgccaaagatcttttaagaaagaaagaaaggaaatcctgaaacaatgtatatctttttttaattgaactaattttttattatattcaacacaatatatactttataccaatcttaaaaatgatggacatgttattaaacataaatagataaagtcttttagtttgtttgtttgattgattgattgtttcgtttttagtagagctttaaaatcttagctcttactgtggtacaaacccaaaataagaataatttttagacattggagttcattgtaacaagactgtacttcaatgtcgctacatcaccaaaggattttacctcgatagtagctaagctaagagttgacagttctactgcaccaaggaatgaattgtaggcccgattatttggatacatattttctgctatggtcaaagctatttgacttgggtgattgtcatcattatcaggccaccaggaacaggttacattcgtttaagaaatggtgtgtgtattaagatggtctatccatgaagtcattaatcaactgtttcaatgaacaatggttctgcttggagggtggcacagatgttaggtgagggtaagattctggttcattggttgtgatgattttgaaaatcattcatctcagaacaagagtaacttacaaggtcctcttcttcaaaattgatacaataattataaacataaagcaaaacatgcagtctcactctttgttgttctcttataagccacctcacaaattaattgtcaacactttttttggcctcgtaaataattttgaaatatgtaagctgttctgaaaaccatagtatactttaaaaacatcaaataaacaagcctactaataggagaagcatgattttaagaccattatgtggtacatagcaagacactgtcacgtacaaacaagcagaaagtatatatggattgtacaatattggacctatttctccaattgccaaattagagaaactactggatgacagccaacaaatttctaattcctcatatttttaaatttcagttgattaggatatgttggtaatattaattttcatattaagagctattaaggaaaagtgactgttacttcctgttaattttgtttttagaggtggaattatgtttgtgtgggcttgtggaaagattatgttcttgctttttctagggtggagtttccctccttgtgttggtgttttctatctattatcctttgtaggactggatttgtggaaagatattgtgtaaatttggttttgtcagggaatatcttggtttctctgtctatggtaattgagaattttgctgagtataatggcctgggctggcattttttttctttagggtctgtataacatctgtccgggatcttctagctttcataatctctggtgagaagtctggtgtaattcatataggcctgccattatatgttacttgaccttttccccttactgcttttaaaattcttttttgtttagtacatttgttggtttgattattatgtgatgggaggaatttcttttctggtccagtctatttggtgttttgtaggcttcttgtatgctcatggacacct

SEQ ID NO: 1717 - DNA, 860 bp, Mus musculus
gcagctgatctttgatctcacttcctgagactcacagcagagggctgcctaccagtcgtatctgcttcctcctcttcctgtggatcagtcctctgcttggaaaacacagaccatgtcatttagatttggccaacatctcatcaagccctctgtggtttttctcaaaactgaactgtccttcgccctggtgaataggaaacccgttgtacctggccatgtcctcgtgtgcccgctgaggccagtagagcgcttccgtgacctacatcctgatgaagtggccgatttgtttcaagtgacccagagagttgggacagtggtggagaagcatttccaggggacctccatcaccttctccatgcaagatggtcctgaagctgggcagactgtgaagcatgtacatgtccacgttcttcccaggaaggcaggggacttcccccggaatgacaacatctatgatgagctccagaaacatgacagagaagaagaggactcgccagccttttggagatctgagaaggagatggctgcagaggcggaggctctgcgggtctactttcaggcctgagagtaactcaaacgattcccaaggcataagaaaatggaccccattcttctggagtcttcgacattggaaatgaagctaaccactctttattgtaccccacgaccccacagccttgtacaaagaactttattgcatgtgtggaagccactagtattatgcttccatcacgatgacaaataggctagcttcccaaacagtggcattgacagcctgccaccgttcctcagttctgtacttagaatagtaacatttccaaactgtccctgagcctagatgaaaataaagtggttgctaa

SEQ ID NO: 1718 - protein, 150 aa, Mus musculus
MSFRFGQHLIKPSVVFLKTELSFALVNRKPVVPGHVLVCPLRPVERFRDLHPDEVADLFQVTQRVGTVVEKHFQGTSITFSMQDGPEAGQTVKHVHVHVLPRKAGDFPRNDNIYDELQKHDREEEDSPAFWRSEKEMAAEAEALRVYFQA
